United States Patent Application Publication US 2010/0029500 A1 - sequence listing, part 2

SEQ ID NO: 3350 - DNA, 495 bp, Cricetulus griseus
  misc_feature (1)..(18): n is a, c, g, or t
nnnnnnnnnnnnnnnnnnaagcagtgaaattttttaagtcctggttgatgggccgtgctactaggagcatggacaacagtggtgcctagggtgatttgaattgtggagacttggctcaaagaggttaatgagggaaagacttcttagtatgttgactagaggtttttcttgtgatatttgggggagagaatgtagttgtgttctgccatattgagattcttatcatgtattgagaaataaaactggggaataaatattaaggaataaacataagaaatcccagcatgactgagacaacattcgccctctctacttcctcaatctaagagtgcccacaaccccttgaccccatctcttcctctcatgtgtgctttcctctttcttttcttagtttctcagagaactcaatagtctattctggtcagctgaatgtggactttaccctctgaatccaggtaagctccaatgatgggttaaccctaaccctaaccctaa

SEQ ID NO: 3351 - DNA, 450 bp, Cricetulus griseus
  misc_feature (1)..(20): n is a, c, g, or t
nnnnnnnnnnnnnnnnnnnngctctcccacaggtgcttgttgtcatgggtggatcttctgctgtggtcttagtgtttccagtctccacccagcagcaacacagcctttgagggcaatgaccactcttctgccattcaaggacacctgaagaatgatcatcaaagacactcagagcaaagttttgttcctcatcagccacctcaggcactttgttagcttaccctgaccacaccagtgcagactaaaaggggcgtgtgtatctgcagattaaaagattcagggatacactttaacatgttaaacactaaattaaaaaaatacctctctttgtctgtagctcaggttgatcaggacttctgccaccatgcccaggaaaactttattttattagcacttatttttagtattacttttaaaatgcttcagtaatttccctaaccctaaccctaa

SEQ ID NO: 3352 - DNA, 556 bp, Cricetulus griseus
  misc_feature (1)..(18): n is a, c, g, or t
  misc_feature (419)..(437): n is a, c, g, or t
nnnnnnnnnnnnnnnnnncagaagtcaggctgtatttctgaaaatttttaatctttaaacttctttcctttggaaaaaaaaagttttgggcaacaattgcattgagcactaacctcttgagttgtgcacagagcaggtctttgtcaccgagtatgtatcgttataaaggattacctggggctgtgttgagaggcgagcagcttcttgagaggctgtcctgataattaagccaaaagtcaaggcctgaaggagggttaaggctctgccgcaagtggaaagggagaggagagactggaactttgacaaatttaattgtataatccaatagtattaaaggaaaaaaggaagcacctgaggcaacttgaggtttaggggtccaccagatgcctgtattgaacatggaggtgcttttctgagannnnnnnnnnnnnnnnnnncattgttttacttagtcctcaagtgaccctgagaggaaatgccattgtcatcccaggagcttgtatgcgactaatgaatctgagatcagacaccatccctaccctaaccctaaccctaa

SEQ ID NO: 3353 - DNA, 385 bp, Cricetulus griseus
  misc_feature (1)..(42): n is a, c, g, or t
nnnnnnnnnnnnnnnnnnnnnnnnnnnnnnnnnnnnnnnnnnggatgacagtctttccttcataagtccaatccccgtttggttcctttgcggctcccaattcctctagggtttggatgtctctttgttcatagtcccatgaggggaagggatggtcgttggtgggctctagagccaggaggttagtggtgtctgtggtcaggggccgcctctcgggcagccaagtctgcccttcgattgccccttgcttcgaaagaatcccctttttggtgccatgtagactgctcccaggttaacagtaataaaaaccccttctggatagaactttacagatgcaggagctggcccattgagttctctgaatgggccctaaccctaaccctaa

SEQ ID NO: 3354 - DNA, 610 bp, Cricetulus griseus
  misc_feature (1)..(18): n is a, c, g, or t
nnnnnnnnnnnnnnnnnnacagtcaaagtttccataaacagaacacatgcacccaggttacagagtatatgttttataaactaaaaatctccaaataaatgtagaaattataaggtattcagtaaagagaattggaaattgcaagtaattttgaaagatacaataaattgtttttcagtgataagaattttttattttttaaggagacagcatgaatactgttccccactaccaagaattggtacagtctaatttcctatatttaggaaaataactggggtcagcacatgcagagatcaatggaataagcatcaccttgaaggttacagaatctccccttccagataagaattaaattttaataaccttctcaatatactatcacaaattatcagttttgaatatgtgactccagcctcttcctctataagtataagcattctagcaattaaaactacatggatatttaccatcacattatatttatgcatgacattttctttttttaattattttttccaacttttttatttgaattagaaacaggattgttttacatgacaatcccaattcccttctcccaccagtcctcccctaaccctaaccctaa

SEQ ID NO: 3355 - DNA, 2469 bp, Cricetulus griseus
  misc_feature (1154)..(1186): n is a, c, g, or t
  misc_feature (2274)..(2294): n is a, c, g, or t
atgatgcttcggtggtctggcatctggggactttctccacctcggatcttcccctccttgctggtggtggttgccttggtgggactgttacctgttctcaggagccatggcctccagcctagccctactgccaacaccatcagaggggctgaaccaccacgggaacgctcaattggggatgtcaccactgctccatcagagcctgtccaccacccagatgaccgcaacttgaccaatttacacattgaacatggcgctaagacacttcgaaaggcctttccagtgctggacattgactacttacatgtgcgcacaccctttgagatctccctctggatcctgctggcctgcctcatgaagataggtttccatgtgatccccaccatctcgagcatcgtcccggagagctgcttgctgatcgtggtggggctgctggtggggggcctgatcaagggtgtcggcgagacgccccccttcctgcagtcagacgtcttcttcctcttcctgctgccgcccatcatcctggatgcgggatacttcctgccgctgcggcagttcacggagaacctgggcaccatcctgatctttgctgtggtgggcacactgtggaacgctttcttcctgggtggcctcctgtacgccgtgtgcctggtgggcggtgaacagatcaacaacattgggctgctggacaccctgctctttggcagcatcatctcggctgtggaccctgtggctgtggtggctgtctttgaggaaatccatatcaacgaactgctacacatccttgtcttcggggagtccctgctcaacgatgctgtcactgtggtcctctatcacctctttgaggagttcgccaactatgactctataggcatctcggacatcttcctcggcttcctgagcttcttcgtagtggccctcggtggggtgtttgtgggtgtggtctacggggtcatcgcagccttcacctcacgattcacctcccacatccgggtcatcgagccgctcttcgtcttcctctacagctacatggcttacctgtcagctgagctcttccacctgtcagggatcatggcgctcatcgcctcaggagtagtgatgcgcccttatgtggaggccaacatctcccacaagtcacacaccaccatcaaatnnnnnnnnnnnnnnnnnnnnnnnnnnnnnnnnnccctcatcttcatcttcctgggcgtctccacggtggccggctcccaccagtggaactggacctttgtcatcagcaccctgctcttctgcctcattgcccgggtactgggtgtgctggtcctgacctggttcatcaacaagttccgcattgtcaagctgacccccaaggaccaattcatcatcgcgtatgggggccttcgaggggccattgccttctccctgggctacctcatggataagaagcacttccccatgtgtgacctgttcctcactgccatcatcactgtcatctttttcacagtctttgtgcagggcatgaccattcggcccctggtagacctgttggctgtgaagaaaaagcaagaaacaaagcgttccatcaacgaggagatccacacgcagttcctggaccaccttctgacaggcatcgaggacatctgtggtcactatggccaccatcactggaaagacaagctcaaccggtttaataagaagtacgtgaagaagtgtctgatagctggcgagcgctccaaagagccccagctcattgccttctaccacaagatggagatgaagcaggcgattgagctggtggaaagtggaggcatgggcaagatcccttctgctgtttcaaccgtctccatgcagaacattcatccaaagtctatggcttcagagcgcatcttgccagcactctccaaggacaaggaggaggagatccgcaaaatcttgaggagcaaccttcagaaaacccggcagcggctgcggtcctataacagacacacgctggtggccgacccctacgaggaagcctggaaccagatgctgctccggaggcagaaggcccggcagctggagcaaaagatgagcaactacctgacggtgccagcccacaagctagactcacccaccatgtctcgggcccgcataggctcagatccactggcctatgagcccaaggcagatttgcctgtcatcaccatcgacccagcctccccacagtcacctgagtctgtggacctggtgaacgaggaattgaaggccaaggtcctaggggtaaaccgggatccaacaaggctgactcggggnnnnnnnnnnnnnnnnnnnnntgaggatggtgtcattatgatgcggaggaaggagccctcatccccaggcaccgatgtcttcacccctgcaccaatgtacagccccagctcccagagaatacagcgctgcctcagtgacccaggcccccacccagagcctggggagggagagcctttcatcccaaagggcgagtag

SEQ ID NO: 3356 - DNA, 207 bp, Cricetulus longicaudatus
cacgcaggctgagatcaatcacttctctaaagctcagaccgctcctaagaagttcgtaaaagaattccgcaattattccatagaaaaagcattgggtgaagtcatcaccgtagacattttggccgaaggcgaaactgttgaagtggtaggcaccaccaagggtaaaggtttccagggtgttgttaagcgccatggattccctggccg

SEQ ID NO: 3357 - DNA, 2744 bp, Cricetulus longicaudatus
  misc_feature (1106)..(1127): n is a, c, g, or t
  misc_feature (2062)..(2080): n is a, c, g, or t
  misc_feature (2359)..(2375): n is a, c, g, or t
attaaagccatttgaggagggaagagtttgttttttagcccatggtttgatggtacagtttatcatggcagrggaagcctggcagcaggaacaagaggtagctgggcacagtgaaccacagtcaagagagatgaatactcagctttcttmtcttcatgtagtccgtacagtggcaccacctacactcaggatgggtcttcccgcctcagttaaaccctttggaaacattcagcggagacacacccaaaggcatgcattgatggtgatcctaaatcctgttaagttgcttttgttttgtattttgttataacaatggaaaaaataacagtcatcaccactttcaccattatcatcaagaccatcatcttctcaccacctgaggatcattagagttgccataggtcctcggtattgatgatagtcacattctgaccttgcctcacttccctagaacccactctggttccctgagacttgctccctgccaagctacaacctcaatacaggcacagaatgaatggttgcaggctgtgccttctgttgcatcctggtgtcacccgaaagaaacaatgacaagaaagtgtgactgcaccgcacttcactggcttcaaattgcatttaatgaaagagaatggcttctgtccaggtttgctgaacagacagctctgcttcctgttactgaaatggcttctctgtctcactcaaagtgtctctctaggtcaaaccgacatgcaggtgaaaaagctgagactgcaggcgtacagctgctgagccagtgatctggactgtccctcctacttccagctctccacttgctgctctccttcacactcccagacaggaaactgtaactgatgctggaacaacataaaatccctcagggacctgctgaccatctgtgagtcacctgcagccacggaggagctttttgtgtcttggcttttaactcaaagtttgtggccaaatatagagaggcagctttcaccttcaatgaaggcatttgggtctcagccagtattgatctgcacttggctccctgtctgccagacaaccttggaatccgttatggatgggctagagcaggattcctggagaagatgctattnnnnnnnnnnnnnnnnnnnnnnctagcagttttttctccctccaagagccagtctccttgtcagtaccagggtgtcttgtcttatggaacctgcttcacagctacctgaggagctgagagtctcgttatatctcagtaacgacaaaggccctcttctcacacttgatttcagaaagcagcaggtgggggaggctaactctgctttagccctcttagcttctttcctgttgctgtgatcagataccctgacaaaagcaacttcagagagaattgattcagcttgaaacttcagattccagtctgtcatgatgaagaagtagcaacagtggggagtctaagagggagctggtcacattacatccagagtcatagcacagacagcaaagaattaatgcagcaaagaattaatgagctactgctcattagtatgctggtgcttggcttgcttcctctacttctacagcctaggattcctgccaagggaatgatgttgcccgtagtgggcgggtcttccaattaactaagtaatcaagagttgttcttcataccgatcgctagtggcctgcttctccagtggttctgcattctgtcaagttggcaagtaaccattgcattccttgtgtgggcatctaacattgctctgttcagtagaaatgcagcgtgagttgtgtggttccaagttttctactagtacattacaaaaagtagtaagaatcaggtgacaatattttgttaaagttttgtatggttttgtatgggtcttttgcctgcttgtatgtctgtgcattgccagtggaggtccaaagacattggatcccatgggctgtaattacagttggtggttgtgagctgctatttggatgcaggatatcaaaactggaacccctgaaggagtaaccagcactcataactactgagccatctctctagcaccaggttgcaatacttgtaatagcnnnnnnnnnnnnnnnnnnntgcacacctttagtcccagcctggaatacaaagtgctttctaggacagccaaggctgtacagagaaactccttgaaaaataaacaaacaaaacaaaacaatacatataatagttaaattgtatcagttatgcccaaaatgtctctcaaaataaataaataaataatttattgttttgtttgagacaggtctctcttcataaccctggctgttctggaactcactgtgaagaccaggctggcttgaactcacacagattgacctgcttttgcctctgccnnnnnnnnnnnnnnnnnaaaagtgtacaccaccactcccagcttctttatattttccagagacggtctcactatgtatccttcgctgtcctggaactcagtatccaggctggcctcaaactcacaagacatctgcctagctctgccatccaagtgttaatattaaaggcgttcaacaccatacttggataatagatttttttaatgagacatttgacattttcctttattattgaccaccaaaatcaccttgattatcatcaccatcactgccattaccaccctcatcatcagcaccaccaccaccaccatcaccattgccattgccattatcatcctggctgtgtttacagctccatctctattggttgaatagccttagataga

SEQ ID NO: 3358 - DNA, 571 bp, Cricetulus longicaudatus
cccatgctgccagagccgactgttccatggatgtagcagctcacaggttttcatttatagttacctgaggacacatggtgtaggcaacagtaaacatgatttaaaatgacaaaaacacttggtccccatagatgtccttgcaacttcattgtaggaccacagttgttgataatatagaggttgccatgtgccatctgcatgggtatcctgtcttcttagtgaaaggttcatcaaacactggaggtgcctatgctggaactttagggctgtgtgtgctgttttctttccatctgtacctgaccccttctcaacatgagacagtcccttgtaacaaaaagtatgtgtcatatgtgcatgtgtttcaaaatagtaccaactgttgtggcagttcctggtggagaggccccagtcctcaggaccgtctctgacccacaccctgggttcttatcacacacaggtcatgttggcagtaaacagaggactccctgccatggctcagattcctaggcccttatttccctcccccggtggagtctgacaacaggagagcagctcacaatcaagaaagctt

SEQ ID NO: 3359 - DNA, 3312 bp, Cricetulus longicaudatus
  misc_feature (763)..(849): n is a, c, g, or t
  misc_feature (2461)..(2501): n is a, c, g, or t
  misc_feature (2658)..(2691): n is a, c, g, or t
  misc_feature (2695)..(2721): n is a, c, g, or t
  misc_feature (3140)..(3201): n is a, c, g, or t
tccacagctgcccatagtgccaagaacaagccaaaggcagaagtgaccatgtccttttcagctgggggacaagtgcatagtgctggtgaagagtagactatatgtctaggcaatctggctcccagccccatggccacactaattgtctcccgggaagtcatggccacccatccactcaggatctacagtgcctcccaacagcctgtccttccctggaccttgtggctcactaggactcaccatggttgctctgtggaaaccttggcatctgatgtagaagactcaacagcattctcctggattctggccttcagggccgagcctggctcccaactacgtgcccgcctcaggcaggactggagctctgagatggtgtcttttgaggggacctacagacacagatgctgttagttctaacagttattcataaccctacccacagcccaccctcagtccagcctccttaccttgtcccgctgctgagctgtggcagaaaggcctggtccttctgaaacagtggtgctctttattttcttgacaggagatgggcttactggggaactagggtcagctggagagctgggatcaactggggaactggggcaggagtcctggtaatcaaaaagctacagatgaatacactagggtggagaggggtgggggggtacctgctctgcaagaagatcactggccttaagagccagaaccaggttgtcagtgaactagaccctaggctgggggggagggggtgcctgtcaattgnnnnnnnnnnnnnnnnnnnnnnnnnnnnnnnnnnnnnnnnnnnnnnnnnnnnnnnnnnnnnnnnnnnnnnnnnnnnnnnnnnnnnnnttttctctccatttcagatgctccagcacaattctttgcggaactatcacccccaacctttgcctgctgcaccctcccagcaaatccaggttcccctctgtagggcagctgttggtctcccctgggggagacagaggagtgcctagccagctccagactctactcctccctcagtcttggcgcccagttccctgcctcagctcccgatggtcagtgttcctctcctagccaggggtcctctggggtcccaagtgcgcctcaccagtccaggccgccgcagcctccgctcgcgggcggccggcctggtcgctcctgggttcggtggagggacgggcacgcttgcgctgcatgctccggatgaactgaggagtcacaagcccactgggcgtcggggtgagacaggccgacttagcccgcggacgagcaaggcccggccgacgcggcggatagaaatcggtaacacgactttgcgccatcgcaaaaagctagttcccgcggatttcgcgcggttttcgcgattccgccttgccccgcccaggctgtaccatcacgcgcagctcttggagggggaaaggtgcatactccagacatgcgcgctagcatgcaccaaatgacgtgcgtcacgtcgggcacctccctgccgccttcagtttgagtgagcgggaatgggactggccatggaatgggtggacaggaatgggctggactcatgaccactggcgtgctgacgtgcggcacagcacatgcgctgtcagtcatttacaagcgctagctaggctgtggagcgtacgggtctcaaatccacgtcgcgcgcacgacgaagtggggcgaccgctagccaatggcttctggcccggcaaagaggcaatcggatgaaagacgcctttgctcctgttgttcacatttgcagaatagcctggtctcgcatgccagcaaagtagctggatcgagtcccaagcagctgctgaatatctggtcccagacgcgcgtagagtctacacagcacggctcaagcaacagaacaggctccaaagcatctcgttgctcttgccacatccgggctatagagtgcagaggtcggctctgggagggggctccagagcaggaagcagcctagaggctgggaaatcaggaaggccacgcagaaggactgatttcctcatcacctgatttcctcagtcactgccacccaacgcttcccgcactctggagggaatggccatgcacatagtactgtcattttgggcaaaggtggctcccaaggaggagggagggctataaggggagggacagcgcggaagcaggacctgggagacctggatagctgtaaggacaagctgcaccgaaggagagttccgaggaggtgggcgcttgtacagttcagagcatcaatctaaaatgcatctgcagctgtggggtgaaggaccaggatttagtagtgagtttccagacttgtgctcgcacctcatgggtgtggtatgccctagagccacacagccggcgtgaggtcttctggatgcttcggagcaaccttagtaaccattccacattagtaaggccacccctggaaagtaggcctttgtatgactcagcattggagcccctcaggaannnnnnnnnnnnnnnnnnnnnnnnnnnnnnnnnnnnnnnnnctggtcacagctgataagagtgatgcatggctgagccaatcagatgttttcctaggactagagaatgctctggggtaggaactacctccaccctgtgtgctagtggcctgtgaaggtaagggcaagcaaacaagtgtaactccagaggactcaagcnnnnnnnnnnnnnnnnnnnnnnnnnnnnnnnnnncccnnnnnnnnnnnnnnnnnnnnnnnnnnngcagagatgaggaatggaacccaaggcattacacacacaagccaatggcaccctaccatctgaactgtgttgcctaactgtgatagttaattttcttcctcagcttgacggggtttcacttcaccatgcctctgggcagtggcatgtccatgaaggatttcctctctcttcctttctttcttatttattttgagtcagggtttctctgtatatgagtactggctgtcctggaacttgctctgtaggccaaacacagagatctgcctgcttcacactctggccaggccctcccccaaactgggaagcaaaacaactccttacattttatcagattttttgtcaaggcctcttccaatccatggaaccttaattaaaacatggtcacaaaaaatcaaagtagcctggcagtggtgcactgnnnnnnnnnnnnnnnnnnnnnnnnnnnnnnnnnnnnnnnnnnnnnnnnnnnnnnnnnnnnnnggcaagttccaggacatcagggctattacacagagaaactgtctaaaaaaaaaaaaagccaagccaaaccaaaccaaaccaacaaacaaaaaagccactccacagaagctt

SEQ ID NO: 3360 - DNA, 770 bp, Cricetulus longicaudatus
tcactgcacacacagtgactggaatcacatccaccaaactccaaatctactacggctcctcagccaactctggcccagttcactctggctctccctgggaggctaacacagctcccttagcaggatggtaggtgccttaggtcctggattacaagtcctgtgtcctatagcattcctgccaggttggaaaacacagccttctgctcagtgacagtcttaatgtttgattgggaaggtacaacctctgcctctatccctcaacatatgggtgacctatttgcttgtaaaaatatgaagccttatcattaattaataaaaaagggggagatgtagggagccgtccctgcattctcctttacaagatgtgcctgcatccggcaggcaccgaatgtaaacaagattattgtgcaggcgctgggtaactttccattccttgatctctgcctattccgtggcgtcatatggtccaatgagctgcagccaatcatggggtgacacgtccgaggcggccgttgccagcctttattaggggacgggattcttggctcggggtctccgcttttgtaagcttatgctctcctctcaagacgcattaaagctttactgcagaaggatccgaatgtcctatgtggttcttgccggcaagacgatcgcgcgggacacatacttgcgccccagacctagctctgctttagcttcttcgttcaaagtaatcaccctgcacaattctcatctgcaggtttccctcacacaatgtgttcctcctccac

SEQ ID NO: 3361 - DNA, 424 bp, Cricetulus longicaudatus
aaagtgatggtgagtcccaattgtcaacttgaggggatttagaaaaaccatggaaacaaacctctaggcctatctgtttctagagagatttaattaagggggggaagatatgccccaaatgtggcaataccttccagcgatgtgaagagctagagtaaataaaagagaagaaagtgagcctagcaccagcatccatcagtctgtgctttctgactgtgcatgccttgtgaccagctacctcatgttcctgacaccttggcttctcttctgggatgggctcccaacagcctgtccttccctggaccttgtggctcactaggactcaccatggttgctctgtggaaaccttggcatctgatgtagaagactcaacagcattctcctggattctggccttcagggccgagcctggctcccaactacg

SEQ ID NO: 3362 - DNA, 424 bp, Cricetulus longicaudatus; identical to SEQ ID NO: 3361

SEQ ID NO: 3363 - DNA, 433 bp, Cricetulus longicaudatus
ggtaccagattaaagcaaagagggggtgctcattcttcagaggccccaagatgttctctggcacacaaccacccagctttgtgagacatctccagctggatactgagaataagactgaacacatcgcagcgtgcggcaagccacttcctgacagcacaggaagacagcctgcagaaagggtcccttcattaagctgataataccccacttatgtggcaatctagcgccaagggctgaggataatttcacaaaaaggaaaaaatttagctgccatggaaacctggacagcaacagatcttctggatgtgacaagattccagacatcgattgcacgaagtctccataaggccagaaagcaccgtggatttaattagttggtgaagcctgtcgcacaggggcagcagaatttgtcctttattctctttccaaatga

SEQ ID NO: 3364 - DNA, 433 bp, Cricetulus longicaudatus; identical to SEQ ID NO: 3363

SEQ ID NO: 3365 - DNA, 3429 bp, Cricetulus longicaudatus
  misc_feature (455)..(472): n is a, c, g, or t
  misc_feature (695)..(700): n is a, c, g, or t
  misc_feature (1818)..(1874): n is a, c, g, or t
  misc_feature (3054)..(3084): n is a, c, g, or t
  misc_feature (3376)..(3406): n is a, c, g, or t
ggatccctgccacgctatggagtgtgcacctgtcactgaaggaagggaccttcagctttgtaaatgagtcagagaaaaatccctgcccagggagtagaaatgctccttgcagtggcctgtgagccataagggtgatgagagtgaggataggcaatagtggcaacatagggcaggatgctgaggtaaaggtttccttctccaggttgaataccatctgtgttgcaaatcaaagacatcaatacttctgactcatagcacaaagttggacactgagaggggttggctctttttcaactaatttgttcataaaaagtgacatcagttttactttctggtttcaatttctcttctgtggggtcagctgccaagaaacaggaagagaaaccagcagccactgttatatatgggtcagtagcacttcattagaagtctgaggacgagattgcctggagcgnnnnnnnnnnnnnnnnnngcccttcaacactgctgggagttgcacagcaaccatgaggtatgtcttcccttgctctggtggtgaggaggtcagccctgctgatggctgcaaatcctaagcagccacagtcccacgagaggctagttgtgtttctgtgtttgtttattgccttgcccacctctgtccctatagctgtaagtatgtcatagagatagatgctcagttgcttcctccagatctnnnnnnccttggtgaggtttagattaagactgttaagaaggatgagaatatttgctgtgatcctactccttgccaggtgaatgtgggatgtccccaaatgactgtttctttatttttttctgtcccacagcacaaccactaagaaatccttggagagcaagctacagcagctaaaatgccatttcacctggaacttgatggcaggagacgagtcattggatgagtttgaggacaaggtgtttaacaaggatgagtttcagaaacgtgagtgtaaagccacaatgtgcaacatattggcgtttgtaaagcaccgcagaggccaaaatgcatcagcactgaaagagttagagaaagctgaacagttcatccagcaacagcatcctgaccacgtagaaatcagaaatatagtcacctggggaaactatgcttgggtttactatcacatgggccaactcgaaaaagctcaggcttatcttgacaaggtgagacaggtctgtgagaagttttccagtccctacaggattgagagtcctgagctggactgtgaggaagggtgggcccgactgaagtgtacccgaaaccaaaatgagagagtgaaggtatgttttgaaaaggctctggaaaaggacccgaagaacccagaattcaccagcggctgggccatctcaaactaccgtctagacttctggccagcacagcagaatgccgtcgactctctgaagcaagccattagaatgtctcccaacagcccttatgttaaagtactcttggccctgaaacttgagatgaatcaggaaaaccagggaaaggaactggttgaagaagccttgagggaagccccaggtgagacagatgtactccgcagtgcagccaggttttattataagacacatgataaagacagagctatacagttgcttagccaggctttagaactcctacccaacaatgcctatgtgtattactatattgggtgtttctataggtcaaaagtccttcaaatagattccagaagagaaacttcacagaatgagaatagagagcagttactgaaacaagcaatttattacttaaagaaagcagaagagaccaaggagatgatcaaagattcctgtagctacctnnnnnnnnnnnnnnnnnnnnnnnnnnnnnnnnnnnnnnnnnnnnnnnnnnnnnnnnnaggattcaagaaggaactcactcctggccttaaacagttgctccacctacggtatggcaattttcagttttttcaaatgaagtgtgaagacaaggccatccaccagtatcttgagggtgtgaaaataaggcagaagacgaagcctaaagaaaagatgacaaacaaacttagattcattgctgaaaggagacgttctcaaaatggatttgactccaaggccttgcacatcttggcgtttcttcaggagttgaataaagaaagccagcaagcggccaaagtctctgaaaggggacaggactctgagaggcctgttttttcaccgtctttgcatgaggggggaaatgaacagtagtaaactggtgcccacaaggctactgctggaaggaaagtagaaacccttaccaagtagccattcagaatacttaacaactacatggaataagcatgtcctaacaggctgactgtagtatttatcagggttgctgggaaccctgtgatcagatgttggcacctaaatctctggatcatgtaggggtctcagaaagaggccagttggaggcacagacacagaggcctggcaaacagtctagatctctttctatttcttagagatagtttccatggtagcaaattttcaaaccccctctgtggatttgtcttgggtttgtttctgtatttatgtaaagcagtcaaattcctcctatgggtgagtttccatccttgagttattgctgatatgcacagccttgttctacataataacagtgtccatcaaaaaactgagcagtggctcagacaataatcccagcacttggcaggaggtgagacaggaggattacagtgagttggaggtcagcctgagcatgacctggaaaggggtgaagggtgttgagaattagacatgtaaatattaaatgattatgtacgttgcttgttagtttggatatgtatatgcctttataaccactatcatcatatgtttataaaacccagaaggtagtgattttgttttactgcataattttgaaatttacaaaatagtgctcaatattaattgagctcaaaatagaaactcaatagtgagttccaggtctaaaaacaaacaaaccataacaaaagctgagggaccaaatcaatcctccctccaattgcccagccagtcctcaatctaccgtgtccnnnnnnnnnnnnnnnnnnnnnnnnnnnnnnncagatggcaatataactggaaaaactgagaccagaggaagttagaaggcaggccatatgtgtgcaaagcaggaagtcaatgccaaacttccaagatgctctcggagggactgcttcctgactctgctctatttgtgagtatgatgctgcatgccccttttctgcctcaatcccagaaaacacaaagccaacaaatcatttctgaaacctctgaaacaaccaaccagaataaagctccctgttcttattatttctctctggtatttgtcacagcaagtgaaaactgttggggnnnnnnnnnnnnnnnnnnnnnnnnnnnnnnntctgctgttcagggacgtcctct

SEQ ID NO: 3366 - DNA, 1050 bp, Mesocricetus auratus
cgcaaaggcgcagccggctcagaagcgtcgagggagctgaggcgtcgacctccgtcccgggccgctgaagaaactctaaagatggtgcctggtggaagaaagcactctgggaaatctgggaagccaccactggtggatcaggctaaaacagcctttgactttgagaaagaagataaagaactgagtggttcagaggaggatgttgctgatgaaaagactccagtaattgataaacatggaaagaaaagatctgggggactagttgaagatgtgggaggtgaagtacagaatatgctggaaaaatttggagctgacattaacaaagctcttcttgccaagagaaaaagaattgaaatgtataccaaagcttctttcaaagccagtaaccagaaaattgagcaaatttggaaaacacaacaagaagaaatacagaagcttaacagtgaatattctcagcaatttatgagtgtgttgcagcagtgggaactggatatgcagaaatttgaggaacaaggagaaaaactaactaatctttttcgacaacaacagaagatttttcagcagtctagaattgttcagagccagagactgaaagcaatcaaacagctacatgagcagttcataaagaatttggaggatgtggagaaaaataatgataatctatttactggcacacaaagtgaacttaaaaaagaaatggcaatgttgcaaaaaaaagttatgatggaaactcagcagcaagagatggcaaatgttcgaaagtctcttcaatccatgttattctgatgagtctttgaagaaagaacttgaacctatgtaatatatgatacagttaaaacattatctatgaggcatgcctatagaaagtatactttgaactataacattcataaccatagcttgtttaagtggaagacttctgttcctgttaacttttaaataaaacttaacagctgtataagtagcagctatttcagtgtatcaagctttcaactcttataatagtgaattgtttgctactattgtgtcaataaaaatgatttaaattta

SEQ ID NO: 3367 - DNA, 978 bp, Cricetulus longicaudatus
  misc_feature (359)..(382): n is a, c, g, or t
ggccgcgaacactggccagaattttcatgttaaacatttaacattggagattcagtcttcagaccaaagagttacggaaaatggcagacggtttttcgcttaatgatgccttagctggctctggaaacccaaaccctcaaggatggcctggtgcatgggggaaccaacctggggcagggggctacccaggggcttcctatcctggggcctaccccggacaggctcctccaggggcttatcctgggcaggctcctcctggtgcctaccctggcccaactgcccctggagcttaccctggacctgccccaggagcttacccagggcaacctggagcatctggggcctaccccagtgctccnnnnnnnnnnnnnnnnnnnnnnnnctatggcgcccctaccggagcattgacagtgccctataagctgcccttggctggaggagtcatgcctcgaatgctgatcacaatcatgggcacagtgaagcccaatgcaaacaggattattctaaatttcttgagagggaacgacatagccttccactttaaccctcgcttcaatgaaaacaacaggagagtcattgtgtgcaacaccaaacaggataataactggggaagagaagaaaggcaatcagctttcccattcgaaagtggcagaccgttcaaaatacaagtcctggttgaagctgaccatttcaaggttgcagtcaacgatgctcacttgctgcagtacaaccatcggatgaaaaacctcagggaaatcaaccagatggaaatttctggtgatataacccttaccagtgctgcacccaccatgatctaacccggaagggcagcgcttgaaactgaagttcaatggtactcatttaaaggctccgtgctcattcggagtggaaaactacatgtattccatcttacccttcttgtaaggcatgcacttaataaatatgcccgtgctgacgggtacctggttgttttgcggc

SEQ ID NO: 3368 - DNA, 536 bp, Cricetulus griseus
cccaagtgaaagaagtagctcctggcaagtcttccttcgttgcttggcaggatggaaggtcgcagcagtgtgggaaaaatcagggtggcccgggaatcccgcgccaaagagccttttgaaaaggcaatgcagaagagaaggcccttttgagagactttcagccaaagaagacccttccccaagcttccgggccagggagcaactagccagggcaatcgggctgcctgagtcccgcgtgcgtgtggtttcagaattgccgaactcgtttggggatggtgaggcaaggcccagaatcctcagggaaccgaagcgtcctggagtccccgcagccgcctgaaatgtctgatgccagggcacaaggtagaaggacttatctgtgatcatttcagtatttctacacaccattgctcagaccctgcagccagccacgccagtctggtttagtcatgttcctgatctgagagtgaccaagcagatgcttgcaaagcctccgttttagctgtgccggtagaagagagattcagtgtatgggtggg

SEQ ID NO: 3369 - DNA, 1164 bp, Cricetulus griseus
  misc_feature (212)..(238): n is a, c, g, or t
  misc_feature (1145)..(1159): n is a, c, g, or t
ggatccacttgactggaaaatcttttctcaacatttagttcttaggcaccaactgtctttgaagatgaagtgtatttctagtatgcagcagaaggatggattctgttttctcattcattccacttacctgtgtctttttatatgtgagttaagtagattaatattgagagatacaagaacgattggttgatcattcttctttgttttggatnnnnnnnnnnnnnnnnnnnnnnnnnnnaaatggtgtgtggatttccacccagtattcttttggctgttggtaaagtgggattatctattgcctgtttttctggttgtagtcaatttccttgggtatgagttatacttccaacactttctgtatggcttgattggtggatatgtgttgtaaattttttgtgagttcaaggtagggaacaagattgtttcacatgtaagtccattctccctctccctccccctaactccatcccacctcgaatgatgcagtggaccacagctagactgagagtacacaggacagcttgatgacactggctgctgcagtgtccaagagagcaggcaggggagtgggcggggcctccacccagcgggtagataaaaggccagggtgtagcacgctgaggcccagacaagcaaaggacttgcttgctctttcctcctggggcggaggtctgttttggtagtggcaagtgaaagaagtagctcctggcaagtcttccttcgttgcttggcaggatggaaggtcgcagccgtgtgggaaaaatcagggtggcccgggaatcccggcgcccaaagacccttttgaaaggcatgcagaaggaggcccttctaagtcgtttcgccaagagcccttccccaagcttccgggccagggagcaactagccagggaaatcgggctgcctgagtcccgagtgcgggtgtggtttcagaaccgccgaagtcgttcggggatggtgaggcgaggcccagaatcctcagcgagccgaagcgtcctggagtccccgaagccgcctgaaatgtctgatgccagggcacaaggtagaaggagcagcccgtcgggacgtaggaggcctcgcactcgactcagctcgacacagttggccatcctgctccaggcttttgagaggacgtacccgggcannnnnnnnnnnnnnnagctc

SEQ ID NO: 3370 - DNA, 1005 bp, Cricetus cricetus
atccaggcgccgacccaggccagagcagccgtcctcggtgccgattcctggaggcctctcggctagagcggcccgtcagctcgcctgctcccggctagagcgtcgcttccgcgtagagccgcgtgtgaccttcccgcctgcgagctatgctgccggcagcggcggcggcggcgagcctgtgggcgccgcggcttgggctgcggggcgcacggctccgcctcgccaggcaacaggtccccggtgtctgtgcagcgcggcagttgagcagcagcagccagcgaaggagtgaagctctcgccggtgcccctctggataatgctcccaaggaatatccccccaagatccagcagctggtccaagacattgccagcctcacgctcctggagatttcagacctcaacgaactcctgaagaaaacattgaagatccaggatgtcggccttatgcctatgggtggcatgatgcctggtgcagtccctgctgcagcagcagcagcccctgaggtggctgagggagaagacatccttaaacagaaagagcggacacacttcactgttcgcctaacagaagcaaaacctgtggacaaagtgaaactgatcaaagagatcaagaactatgtccagggcataaaccttgtgcaggccaagaagctagtggagtccctgccccaggaaatcaaagcaaacgtcgccaaagccgaggcggaaaagatcaaagcagccttggaagcagtgggtggcactgtagttctggagtgacactctctttctgaggactttcggactggggtccctgggacctgggcaaaggcctgctcacccctgcttcactcccaggtggcttgttgggagcaacagctgctgacacttggtgaccgaattctcctgggagagggacaggatggacctactgtgatggggaggggcagtttacagcctgtgcagactctcaagagattgccttgagatgctataaagtgaacagccctggaggcgactaagagag

SEQ ID NO: 3371 - DNA, 964 bp, Mesocricetus auratus
  misc_feature (928)..(947): n is a, c, g, or t
aaatccaacatgaaaatcctcgtggccgttgcggtcttttttctcgtttccactcaactgtctgcagaggaaatcggtgccaacgatgatctaaactattggtccgactggtctgacagtgaccagatcaaggaggcgctgccagagccctttgagcatattctgcagagaatcgcccggagacccaagcctcagcagttctttggattaatgggcaaacgggatgctgattcctcaattgaaaaacaagtggccctgttaaaggctctttatggacatggccagatctctcacaaaaggcataaaacagattcctttgttggactaatgggaaaaagagctttaaattctgtcgctttcgaaagaagtgcaatgcagaactatgaaagaagacgtaaataaactccatagcacactattattcagcttcatttgtgtcaatgagtggtgaaaggtaaaataaaatgcactatgaggaatgattatttatttaataacaaatgttgttatgagtggcggaactcaaaaaagtgtttattttttcatattgtgccaataagaggttgtaattctaaatatggggacctcctcaggaagtaggagttaggtagtaattcccagcaaaagcacggtgtcgatggtattgcacaagcttgccaaggatgcagtcgccaaagaaagacatggccactcagagccagttcagacagctgctgccatgagcgcaggaactcctgtgtgctcttgtgcttttaggctgacagtgtagaaactttggcatctgactctattggtatcctagcagcatgtttcatgttttgtgactatatagagatgtttttaaaagtttcaatgtgactccctggtcttcattcattgtatgatgtgttgtgatagctaccattgtaaataaaagaatctatcttcnnnnnnnnnnnnnnnnnnnngagctctagaattcagg

SEQ ID NO: 3372 - DNA, 919 bp, Mesocricetus auratus
  misc_feature (883)..(902): n is a, c, g, or t
aaatccaacatgaaaatcctcgtggccgttgcggtcttttttctcgtttccactcaactgtctgcagaggaaatcggtgccaacgatgatctaaactattggtccgactggtctgacagtgaccagatcaaggaggcgctgccagagccctttgagcatattctgcagagaatcgcccggagacccaagcctcagcagttctttggattaatgggcaaacgggatgctggacatggccagatctctcacaaaaggcataaaacagattcctttgttggactaatgggaaaaagagctttaaattctgtcgctttcgaaagaagtgcaatgcagaactatgaaagaagacgtaaataaactccatagcacactattattcagcttcatttgtgtcaatgagtggtgaaaggtaaaataaaatgcactatgaggaatgattatttatttaataacaaatgttgttatgagtggcggaactcaaaaaagtgtttattttttcatattgtgccaataagaggttgtaattctaaatatggggacctcctcaggaagtaggagttaggtagtaattcccagcaaaagcacggtgtcgatggtattgcacaagcttgccaaggatgcagtcgccaaagaaagacatggccactcagagccagttcagacagctgctgccatgagcgcaggaactcctgtgtgctcttgtgcttttaggctgacagtgtagaaactttggcatctgactctattggtatcctagcagcatgtttcatgttttgtgactatatagagatgtttttaaaagtttcaatgtgactccctggtcttcattcattgtatgatgtgttgtgatagctaccattgtaaataaaagaatctatcttcnnnnnnnnnnnnnnnnnnnngagctctagaattcagg

SEQ ID NO: 3373 - DNA, 1744 bp, Mesocricetus auratus
ctgcagctgcaggctgttgcatggctcccatggaccctgagcgctgcgcgccttttgccgtgggcccggcagccggtccctatgcggccgcgggggacgagcctccaggcccccaggggacttccgacgcttcgcctcacctgcaccccgcgccaccccgcggcccgcggctgagtcgcttcccggcctgcgggcccctggaaccctacctcccagagcccgccaagccgcccgccaagtacctgcaggacctcgggcccgccccggtactcaacggcggccacttctacgagggccccgcagaagctgaggagaaggcctccaaagctgccagtttcccccagctgccggtggattgccgagggggtcccagagacggaccctctaatgtgcaaggctccccaggcccctgcctggccagcttgcgagtccctctttcccctggacttcctgacaccatggagttggccaagagcaagagcaagaagcgtcggaaccgcacaaccttcagcacattccagctggaagagctggagaaagtcttccagaaaacccactacccggacgtgtatgcccgagagcagctggctttacgcacggacctgacagaggcccgggtacaggtctggttccagaaccgcagagccaagtggcggaagcgtgagcgttatgggaagatgcaggaggggcggaaccctttcactactgcctatgacatctctgtgctgccccgaactgacagccatcctcagctgcagaactctctgtggcccggttcagggtctgggagcccaggggggccctgcctcatgtctccagagggtatcccctctccatgcatgtctccatactcccactcccatggaaacgtggctggcttcatgggagtgccagcctcccccgcagcccaccctggcatctattccatccatggctttcctcctgccctgggagggcacagctttgagccttctccagatggtgactacaagtccccaagcctcgtctcgctcagggtaaagcccaaagagccccccagcctgctgaactggaccacgtgatgggttacggggacacagaacgagctgctcactcctcttcctgctctcccctgctcctcgccccatctctgcctggacaccggacagaaaccctctgctccatgtctgggtgggtcccagaagcttgggagagaagcttcagggatcaggctacagggtcttaagctctaaaaaggtgggaccccctgagagactcaagcatgtaggacactttctgtaaactgggtcccctcgttcaaattgggctagagacactgcctgttttctcaaagactatttctaagtctggggagccagcccaggaagacgggaggagaatgcagactgagcagggaggagctctctctctgtggcactcagggctggcctcgcttctgcctttctaccaccagggggcgtttgctaagtgcccggagctgacacgtgcccagaggacaaaggtcagcttaataaaaggcgggggtttcctctgctccaagcatccctcaaatctttctgccccgtacccagtctatcaatatactgtggagtcattttctccaaggacggaaaagattccaccaatcattaaatatttggatttgctttcatgggatcaggccagggctatgccatggaaaccatattggatgttgatcaaaataaaacagatttttctagtctctgaaaaaaaaaaggaattc

SEQ ID NO: 3374 - DNA, 2130 bp, Mesocricetus auratus
  misc_feature (784)..(808): n is a, c, g, or t
  misc_feature (961)..(992): n is a, c, g, or t
gaaagaaggaagagagggaggaggcaggacagagggagggactgcccgggaggcaggagcgccgcaaggagccagcggaggaccgtgggtcgaggtgcagctagccacccgcagctccccgcgccccctcatccctagccctctgcgcccctggcagcctccagcgttcgtccccaggcagcatggtgaggtctgttctgggtccctcgccaccatgtacgtgagctacctcctagacaaggacgtgagcatgtaccccagctccgtgcgccactccggcggcctcaacctagcgccgcagaactttgtcagccccccgcagtacccggactacggtggttaccacgtggcggccgcggctgctgctgcggcgaacttggacagcgctcagtcgccagggccatcctggtccaccgcttacggagcccctctccgcgaggactggaacggctacccgcctgggggcgctgccgcagccaacgctgtagcccacggcctcaacgggggctcaccggccgccgctatgggctacagcagccccgccgactaccacgctcaccatcacccgcatcaccacccgcaccatccggccgccgcgccgtcctgcgcctccggcttgctgcagacgctcaaccccggccctccgggacccgcagccaccggcgccgccgaacagctgtctcccagcggccagcggcgaaacctgtgcgagtggatgcggaagcccgcgcagccgtccctgggaagccaagtgaaaaccaggacgaaagacaaataccgggtnnnnnnnnnnnnnnnnnnnnnnnnngagctggagaaggagtttcactatagtcgatacatcaccatcaggcggaaagctgaattagctgccacactggggctctctgagaggcaggttaaaatttggtttcagaaccgcagagccaaggaaaggaaaatcaacaagaagaaattgcannnnnnnnnnnnnnnnnnnnnnnnnnnnnnnntggcatcacctccaccacagccctcgcagcctcagccagggtcgctgaggagcgtgcccgagcccttgagtcccgtgtcatcactgcaaggctcggtgcctggttctgtccctggggtcctggggccagctggaggggtgttaaaccccactgttacccagtgacccctcccatggtctgtagcggcggcagagcaattccaggctaagccatgaggagcatgggcgctgctagagtcctcagaagagacccctctcctgccacccacaaacaatacctacagatgaagaatggggacggaagtaaagacaagtgggactgtgggcctcaggggaagatatggtccagttttttattttttccattctgactcttccggccagtgatgacaaaggaagtgatctctgggccttcgttcatgctccctgccaggactggctacaagctttcagcctcttctgccccggctcttagcttcccatatggactgtgtatctggttggagggagtgaggctgggagaatgagcaatacttgagccgagatggctgtttcctactgactgctctctgagaaccagctggacgtcctgcctcaggggcagggacagttcaaactgcaggagccagaggcagctgcatcgcaggctgggctgatcaaagtctgcagagcccccaggtggtctgtgtttttcttctccctttacagacctggaagggttggtgggttcagggactgcggccagaggagggggtggtcaccaactccaggccctgcgacaagggcttgtttggaaagcctgtcaccagagctgctgtaggctgaatgtatgtctgtgttgtaaatgccagagccaacctggacttccggttctttccctagtctctggctggtgaagaacggagctgttgctgctgttggagtcattgatctgtgtaaccagctaagcaagcctttaaaaagccatgggtagacaggtgatacggtgtagggaagtaggggtatccgaacacagtcgacttttattttctaagaagacaagataaaccaactttacagatttcagatcctggcatttatcttctttggattttgacaaattattttttttcaggaaataaaatatgttctctgattgt

SEQ ID NO: 3375 - DNA, 264 bp, Mesocricetus auratus
ggatcctgcagtgtggcccgcgcggctcatctcgcagctttcctaggcttaacgaaagcacttccctgtcccaggtcccgaaaaccaaagaagaagaacccgaacaaagaggacaagaggccccggacggccttcaccgctgagcagctgcagaggctcaaggccgagtttcagaccaacaggtacctgacagagcagaggcgccaaagcctggcccaggagctcagcctcaacgagtctcagatcaagatatggttccaaaac

SEQ ID NO: 3376 - DNA, 1277 bp, Mesocricetus auratus
gacactccttctgtcctttcccaggagtttggcaactgagggagcagagtcccagaaggcactgaagctagacgcatctctttcccggctctacaggtcttccaggttcatctcgaacatgttggacggcctgaagatggaggagaactttcaaagtgcgattgagacttcggcctccttctcttccttgctgggcagagctgtgagtcccaagtctgtctgcgaaggctgtcagcgggtcatctcggacaggtttctgcttcggctcaacgacagcttctggcatgagcaatgcgtgcagtgcgcttcctgcaaagagcccctggagaccacctgcttctaccgggacaagaagctttactgcaagtaccactatgagaaactgtttgctgtcaaatgtgggggctgcttcgaagccattgcccccaacgagtttgtcatgcgcgcccagaagagcgtgtaccacctgagctgcttttgctgctgtgtctgtgagcgacagctgcagaagggggatgagtttgtcctgaaggagggccagctgctctgcaaaggggactatgagaaggagcgggagctgctgagcctggtgagcccagcagcctcagactcaggcaaaagtgatgatgaagagagtctttgcaagtcagcccatggggcagggaaaggaacgtcagaggatggcaaggaccacaagcgacccaaacgtcccagaactatcttgacaacccagcagaggagagcattcaaggcctcatttgaagtatcctccaagccctgcagaaaggtgagggagactctggctgcagagacaggactgagcgtccgtgtggttcaggtgtggttccagaaccagagagccaagatgaagaagctggcgcggcggcagcagcaacagcaacaggatcagcagaacacacagcggctgagctctgctcagacaaatggtggtgggactgctggaatggaagggatcatgaacccctacacagctatgccaaccccacagcagctgctggccatcgaacagagcgtctacaatgctgaccccttccgacagggtctcactccaccccagatgcctggagatcacatgcacccctatggtgctgaacctcttttccacgacctggatagtgatgacacttctctcagtaacctgggcgactgcttcctagcgacatcagaagcggggcccctgcagtccagagtgggaaaccccattgaccatctgtactccatgcagaattcctatttcacctcttgagtcttctaga

SEQ ID NO: 3377 - DNA, 1302 bp, Mesocricetus auratus
  misc_feature (847)..(873): n is a, c, g, or t
aaccaaagaccatggtgcactgtgcgggctgcaaaaggcccatcctggaccgtttcctcttgaacgtgctggacagggcctggcatgtcaagtgcgtccagtgctgtgaatgtaaatgcaatctgaccgagaagtgcttctcccgggaaggcaagctctactgtaaaaacgacttcttccgatgtttcggtaccaaatgcgcaggctgtgcgcagggcatctctccaagcgatctggttcggagagcacgaagcaaggtgtttcatctcaactgcttcacctgcatgatgtgtaacaagcagctctccaccggagaggagctctatatcatcgatgagaacaagttcgtttgcaaagaggattacctgagtaacagcagtgtcgccaaagagaacagcctccattctgccaccacaggcagtgaccctagtttatcgcccgattcccaagacccatcgcaggatgatgccaaggactctgaaagtgccaacgtgtcagacaaggaaggcggaagcaatgaaaatgatgaccagaacctaggtgccaagcgcaggggaccccgaaccacgatcaaagccaagcagctggagacattgaaggcagcctttgcagctacacccaagcccacgcgacacatccgtgagcaactggcccaggagactggcctcaacatgcgtgtaatccaggtctggttccagaatcgacgttccaaggagcgaaggatgaagcagctaagcgccctgggcgcgcggcgccacgcctttttccgcagtcctcgccggatgcgaccgctggtggaccgcctggagccaggcgagctcattcccaacggccccttctccttttnnnnnnnnnnnnnnnnnnnnnnnnnnngtcccgggggcaactacgacttctttccgcaaggaccaccgtcctcgcaggcccagacaccagtggacctacccttcgtgccatcatctgggccttcagggacgccgctgggaggtctggaccacccgctgcctggccaccacccttccagcgaggcgcagcgattcaccgacatcttggcacatcccccaggggactcgcctagtcctgaacccagtctgcccgggcctctccactccatgtcagcggaggtcttcgggcccagtccacccttctcatctctgtcggtcaatggcggggccagctacgggaaccacctgtcccatcctcctgaaatgaacgaggcagccgtgtggtagcgggccttgcgtgggccacgggagctcgtggttgtacagagacgagcttttatttaaaaaaaaggaattc

SEQ ID NO: 3378 - DNA, 892 bp, Mesocricetus auratus
ggcataaattgcggggtccggaaccatgtcgctgaccaacacaaagacggggttttcagtcaaggacatcttggaccttccggacaccaacgatgaggaaggctctgtggccgaagggccggaggaggaaagcgaagggccagagcccgccaagagggccgggccgctggggcagggcgccctggacgctgtgcatagcctgccccttaagagccctttctacgacagcagcgacaacccctacactcgctggctagccagcaccgagggcctccagtactccctgcacgggctggcggccagcgctcccccacaagactccagctccaagtccccagagccctcggctgacgagtcaccggacaatgacaaggagaccccgggcggcgggggggacgcaggcaagaagcgaaagcgccgagtgctcttctccaaagcgcagacctacgagctggagcggcgcttccggcagcagaggtacctgtcggctccggagcgcgagcacctggccagcctcatccgcctcactcctacgcaggtcaagatctggttccagaaccatcgctacaagatgaagcgtgcccgggccgagaaaggtatggaggtgacacccctgccctcgccgcgctgtgtggccgtgccggtgttggtcagggacggcaaaccgtgccacgcgctcaaagcccaggacctggcagccgccactttccaggcaggcatccccttttccgcctacagcgcgcagtcgctccagcacatgcagtacaacgcccagtacagctcggccagcaccccccagtacccgacagcacaccccctggtccaggcccagcagtggacttggtgatcgccacctctccaagactcgaggccgtaggccctggccccaccc

SEQ ID NO: 3379 - DNA, 576 bp, Mesocricetus auratus
cagaaaacggagtcaaagcaagccgggaggagaaggcagagagcgcgagttcctcggtctcagagcccagtgcaagcgcttccaccgccagcagagtgcattccagtcctgccggcacagtcgtgacgccctctgctgttctccccgggctagcacaggtgatctccgccgtgtctgcccagcagagctccaacctggtccccaaagtcttaatcccggtcaacagcattcctgcctacaacgctgcattggataacaacccgcttctactcaacacctacaacaaattcccttatcccacactgtccgagattacagttctttctgctcaagcaaagtacacagaggaacagatcaagatctggttttcagcccagcgtctaaagcacggcgtgagttggaccccggaagaagtagaggaggcaaggaggaagcaattcaatgggacagtgcacactgtacctcagaccataactgttattcctacacacatctccacgggcagtaacgggctaccttctatcttacagacgtgccagatagttggccagccaggcctgggtcttactcaagtag

SEQ ID NO: 3380 - DNA, 1168 bp, Cricetulus longicaudatus
ctgggcatcaatgggaaggtgctgcggatcttcgacaagagaacccagcaaaaattcgccctgaagatgctccaggactgtccgaaggcacgcagagaggtggagctgcactggagggcctcccagtgcccacacattgtggacattgtggatgtctatgagaacctgtatgctgggaggaagtgcctgctgattgtcatggagtgtctcgatggtggagagctctttagtcgaatccaggaccgaggagaccaggcattcacagaaagagaagcgtcagaaatcatgaagagcattggtgaggccatccagtatttgcactcaatcaacattgctcatcgggatgtcaagcctgagaacctcttatatacttccaaaaggcccaatgccattctgaaactcactgattttggctttgccaaggaaaccaccagtcacaactctctgaccactccgtgttatacaccatactacgtagctccggaagtgctgggtccagagaagtatgacaaatcctgtgacatgtggtccttgggtgtcatcatgtatattctgctatgtgggtatccccccttctattccaatcatggccttgccatctctccgggtatgaagacacgtatccgaatgggacagtatgaatttcctaacccagaatggtcagaagtatcagaagaagtgaagatgcttatccggaatctgctgaaaacagagcccacccagaggatgaccatcacagaattcatgaaccacccctggatcatgcaatctacgaaggtccctcagactccactgcacaccagccgtgtcctgaaggaggacaaggaacggtgggaggatgtcaaggaggagatgaccagtgccttggccacgatgcgtgttgactatgagcagatcaagataaagaagatagaagacgcatccaaccctctgcttctgaagaggcggaagaaagctcgtgccgtggaggccgcagcccttgcccactgagccgctgtgtttcccaccccactggaggacaagcaataactctacatgaatatattttttaaacaaagagacacaagctgcccactgctgcctcctgtcctcctgggctatgtggagcccagatatcctctggctgattctgcccttggctctgacctccctggagaggagggttggg

SEQ ID NO: 3381 - DNA, 2267 bp, Mesocricetus auratus
  misc_feature (129)..(146): n is a, c, g, or t
  misc_feature (382)..(397): n is a, c, g, or t
  misc_feature (399)..(415): n is a, c, g, or t
  misc_feature (808)..(826): n is a, c, g, or t
  misc_feature (828)..(844): n is a, c, g, or t
  misc_feature (914)..(946): n is a, c, g, or t
  misc_feature (1635)..(1649): n is a, c, g, or t
atataggcgcatgaagtaatggttactgttttagtaattctgtagctacaatcaggacgtaaggccaatttagcaaaagctttaatagcacactccatatcctcccatggctcagcctccaaaacaatnnnnnnnnnnnnnnnnnngtaaaaccaaaaataaataaataaacaaataaataaataaccccccccaaaaaaaaaccaacagtcccggctgtccccaaactcattctgtagaccaggctggccttgaactcacagatctgccatcttgcctgcctctgctggcattaaaggtgtgcgccaccaccaccaggtggagaccctgtctgtaagagaaaaagggggctagtttcaggacagtcagagcttgttacatnnnnnnnnnnnnnnnngnnnnnnnnnnnnnnnnncggggatggggagggtaagggaataaacggaagtagggatagaatactagattcatgtaaaaaccaaaaatctaggaacgcaagccaaatgtaggagcacagcgccagtgaggtggagaccaggagatccaggagctccacactcctacatgacaaggtgtaggcaccaaggccgtcacacagcttgcaggcacctggacaggttggggagcagtgtctcttccgggcagctcagctagtctgagtgtctcttcagctgcagcactgataatatatccttggggagggagggaggaaggacccgtgttgtctggtcagtttcagagtctaggggtttcctagcctccctagtaggccaggtgatggtggtgcacacctttaatcccaacactnnnnnnnnnnnnnnnnnnnannnnnnnnnnnnnnnnnaccaacctggactatagttccaggatacaggacagcctcccctcccaatccacagagaaacccttcctcnnnnnnnnnnnnnnnnnnnnnnnnnnnnnnnnntgtacctgtattgtcttgacactatggtactatttaccaacatgtgagatgggggtgttgggatgcagacaatgaaaaatgacaagtcattcttcattatcctaaaatgataaatctgtaacctcgggccaagtaagggaaatacaaggatgaaatttgtagttcatccctacaaacatgatgatgtaactgctcttccatgacagtcttccagggctagtaccaatactgtgaggcataaggacggtgaagatcttttcagatgctagcaaatgtgttcataagctagaggataatcagtgagtcttcgtgaagcaaagcaaacctttagcaattcctgctatttgtaactcatattgccactgccacccaaatccaaagacagggcagtataatactaaaatctctaagtctgcttttcatatttagttacttttttgggacacagagagaggccagagctagcatacttcccaacagaaggcaagctgcagtgcttgtactccactgttgcataaatgggctcttggagacttaacagaaattgggtttagtactgtgttagatgaccctatagggacataggaagaactaaaatttcagcgaggtgtgcttataattaagactaaccaagctgtttctccttgtccctttttgtaagctcagtacctatacatggaagggaactnnnnnnnnnnnnnnngagtatatttcaaatgactatggtagtactgagaaacaggccttgcatgtgtaaagaacaagtaagaggaaaagaaagccttaatgatagatcgttcaagaaggttcacagaaaacgcccaaccttaggcctttaatatactttgttaccttgttaaagaagatttcattgctaccacaatcaaagagaacatggaatgcctcatctctggaaagtagatgtgacaacagattggagaatctatcatctaaagctgaagcgtttacaatcccttacagctaacgggctaccccctgagagtactgtcatacaaggtagcgccactgtctaagagatggaaatgtcacacaactgaagatgtaccagtgactgttctttgtggattttcaaatgcctctagaccagtggttctcaaccttcctaatgctgtgaccttttagtacagttcctcatttcgtgatgacttccaaccatagttattttcgttgccacttcacaaatgcaactttgactgttatgaatgtaaacatctgtgttttccgatggtcttaggcaacgactcctgtgaaagggtcatttgaccccttggaacctactggttgagagccactgctctag

SEQ ID NO: 3382 - DNA, 5376 bp, Mesocricetus auratus
  misc_feature (911)..(939): n is a, c, g, or t
  misc_feature (1555)..(1608): n is a, c, g, or t
  misc_feature (2547)..(2564): n is a, c, g, or t
  misc_feature (3949)..(3991): n is a, c, g, or t
cacttcctcatccgcccaaacttacaagcacgccaaagccacacctccacccaatcaaattacacactacgcccacttcattttaatattggcactagtccagtataaggtatattattagatatttacacacaggaaacgatgcatatttatgcccaaacttttacacaaatgttgatagcagatatttttcccgagtggaaacagcccaatgtcagtacatcaactgaagaacagacagggaaaatgtggtatgtctgtaagatgtattacctggcttctcagactctggcttgtgagaacccagctggttgttttgctctttctcagtaattctcttaatgttgtttcttatagacttctaataattttaaatacaggaaaaataccttttaaccatttgtcattaaccctctaatatggggaagaaacctcctatcctcttaagttactgtcttacttcctttcttcctttcattgtcagtcagagagggagtgagaggagatgggagcaaggacagcagagaaagagatctcagctgtccctgcttcttttgtgatccctgtattctgaactactacagtccagattcttcagattcttcacagtatacattctctgtggtcttttgacagccttgattactggctgctcctcttcctgtgtcatactccaaccttgtttctagattgctgacattctagaattgcaccacaggtcctgcagtttaaatgctgcctctagataggcaaatctctgacatacactaggcctggtgtctcttttcacctacacttgcacagttatgtgtgctgcttcccacatcatcctttagtgaaccagactcagtgcccagaagagcatctgcgcttgctgtgccagtcccttacaggatacttgtttatattgnnnnnnnnnnnnnnnnnnnnnnnnnnnnntcacaacttcccacaccaagcctgttgcaacttcattcgtttcttcctttttaattttctttctgaaattttcttcctttggtaggagagggaatttacggtcaatctgcttcatgcgtttccttttgattcctacctggatgtatctgacatccatccatccttagcctcagtggttatgtttttagtttgttgcacagtatttgtttcacttatttggcagttgttttaaatattgccttgaaatcattattatatgcttgacttatgttgatatttcacatttagattttacacagcttgttaattcatatatttcctaattcctagaacaaaaatactctgaaattatttagcaaattggaaatattttattgatgttccttaatatcttccttaatatctacctccttatttaatttttttggttttttatgttttgttcactgtattctcatagtctatagaaatacaatttacacacctcttccagaaaaaaaaaatggtacacacctcaaatcccaacacttaggaggcagaaacaagaatcaaagctatccaggttttattgccaaatgtaacacctgcctgagcaatgtaagaccatgactcaaannnnnnnnnnnnnnnnnnnnnnnnnnnnnnnnnnnnnnnnnnnnnnnnnnnnnnggtcactaataaatatttaaagttgtaagaatggagggtgataaaataatttatttcacacttgtagataggttgttctatgtgtcataaactcatttaattgccctatattgccattaatctcagaaatatcatagcctcaagatttttatttcttaaaaagaaatatcaaaacattgttaagctataaggttttttttattatatccctgaaaactgaggaatttttttcatttcatcaaagagcaattttttaaggacttagctacaaatcctggaaaatagaagtttctgatggaattcctagcactgacattattttaagtacaataacactgctggtgcccactattgtaagaccccagctgtcaaccaggtggtccttctacaatagagagagtgtggtgttatttcgtgttcatatttatttttggcaaatgatcggtgccctaaatggcctggcagctagacatctgtctgtaagttttaagacattgatacaaatcagacacatatttccagataaccctgaaaagacacatgtatagcttatgagaaatcatgattacagccatcatattttttacttctctgcatattattttgatcctttattaaagtgaaataaatatttaaatatatgaaaattaagttattatttgagtaactaaatcttagttttattatttggtaatcttgtaacctggggttcttttgctttgcccttgaaactgaaatatgaagttcattccttgtgtactttacactgagtttggtgatctctataaacactatgtaagtctgctttgatgtctatattttagaagcttcctttgttcagttgcatagcatgtgacttactcagtttgactgtattttcctaataaaagtacaatttgtaggtgttgatgcaataatctgaaataacaggcaaagatnnnnnnnnnnnnnnnnnnttcttcctggcttggtaaatgccagcttactttgcaagtgttgttataaaatacctactactcagttaatttagtacttctgaaagcaaacaattagggtccctatcagggaaatttactgaaacacattttctaaagcttcagtggccaaaagacagcactggaatgtgagaaactaattttcgtttgttttacacctcagaatgttacaaattaatcaagtgctacttaaagtctagaactcattaactttttaagttttccttttcccatgacagattaggttatagcataaagctttagtctctggttgattagactgccatccccactgcacaaataccctcttatctgcagtgtagtgagtgagggctgtggtctgtgcagctcaaaagaactagtttactgttacaggggacccagcaggagactactcctgctctgtctgcttactgaagctgggagggagactgtgtgttactcaaacacccatttgttaataaagaaaaggccttactgacattacaagtatttaagcattagattcttacttaaacacccctgagagggaaagttgtacaatgtgtttatttaggggccacaagtgaaatttacatatcaaataaaagttccagacccctaagtagcccgtgccttcttgtggctagaaactcttactcagaaaagacataccaggttgttcctagtagaaaaacaagttgtgtggcatcatagaaagaaacatcgtgtaggaatgtgtatctcctgcaaactgaaaaccatatactgaagcaagatgtaatagcatccatgcctttttaaattttgtgttatgtggaagagcagagtttatgagagctgtaaaacagattgaggttcatagtgaacagggacagaatgaaaagtattgaaggaacagcaggaaccttttgtaattatgaaagacatttcttcattctgtttttctttcttttgtaatctaaaaacagtagcagggggttacaagcagagttcatcacaggttgtcaatcactgtcatttagcatttgtagtggaagatgtctttattcaaagacagctgagcaaatcagaaacacagatttgtagttagtagtctgtccagcctgcactaaataaacaaggccagcgctaacaaccagcctctcatataaaaatataatggactccactgaccttgctgccctccattcagcttcaatccctgttacataaaagcttcactacccacattcaatttcctttaattacctacatgatgtagataagaaaatgaaccttccttatagtcaatgatcacacacaggaaattagacaacttgtttaaaattagaggagtaatttggaagtaaataattctgtatgtnnnnnnnnnnnnnnnnnnnnnnnnnnnnnnnnnnnnnnnnnnnattgggattattttcttagctctgctgatcctgggattgctgcttttctagccaatctaaactgagttttaaaaaaatcccctttgtgagttttctaaaatatccatcataataaaatacttgtgaggacttaagaggtaagcaaagtggtgaagcaagcatgtcacatgctaacgagcttagaaaattgtgaaatggaattccacaaacaaatgtctgtgactttcacaggagggtctggcagagcagtagaggattaaagagcagttgtcttcagtcctcattttaactctgcttctgaggttcattagcaggctaacagcaacagcagcaagaagccagtaatactttttgtcatcaatctaaaagtcacttttcatttgtgtggatcataccatttgagcactgattagaaaacaatgtaaggtttcaaaattatgtgacttttctagacttgtgaggaaaatgattctttggtttctcctatctatacagtaacttcagttagttccactgaagtgtgtggaaaagtgtgttgccttatcacccacaccaagtccttttttcaatattatactaataaatatttaaaagagacctgcttaggatcagagactaaagcccacaatcaagaggtacaacttctgaatatactataagtatattcatattgtctttgaaagaaccaatgttttctcttcctgaatgacattaaaattctgtgattattttagtggccaacaagttggttcagcaggaaaagggagttgatatgagatgttaaaacatacctacttagttataaacaaatatatatacctaaaaatgtaaaccaaaactcaaataattgactcaagttagttcacatcatgtataatattagatatggtgatcatagtcattattataatacctcttacaggaagtctttactgtcacattgaattcttataccaacccccaagttaagataagaatttgggctttgggggtacagtcagtgtcagaaggactcatggtttgtaaacagcagagctagagttcactcatccctgagctggcccataccacatcatccaccctgttgatttgtgtagctctaagacaatgaattacctaccacattctttgaattccacttaatttaaacattgagcagaaaagaaaagctgtttggagtcagggtctcagtggtagagtgcttacccatcaggtgagagattggagtttcaaactcccaccacaccccccaccctcctgctgccccaatcttcaaaaatcaaaaaaggaaataacagctttaaatgatgatagtctttttactgtagataacttaattacagaaatagctgttaattttaggttttattaatatttataagcca

SEQ ID NO: 3383 - DNA, 382 bp, Phodopus sungorus
ctattgcctaaccatcaacaccaccatctgtgccgggtattgtatgacacgggatatcaatggcaagctgtttcttccaaaatctgccctctctcaggatgtttgtacgtacagagacttcacctacagaactgtggaaataccaggatgcccacatcatgttgctccttatttctcctaccctgttgccatgagctgcaagtgtggcaagtgtaatactgactatagtgactgcatacatgaggctgtcaagaccaactattgcaccaagccacagacattctatctggggggattttccgtctaactttaacaacattgccacttgcaatctggttaaatgtgtttacctggaatagaactaataaaatactattgatac

SEQ ID NO: 3384 - DNA, 1191 bp, Mesocricetus auratus
  misc_feature (21)..(794): n is a, c, g, or t
cacgaggcctcctggaggagnnnnnnnnnnnnnnnnnnnnnnnnnnnnnnnnnnnnnnnnnnnnnnnnnnnnnnnnnnnnnnnnnnnnnnnnnnnnnnnnnnnnnnnnnnnnnnnnnnnnnnnnnnnnnnnnnnnnnnnnnnnnnnnnnnnnnnnnnnnnnnnnnnnnnnnnnnnnnnnnnnnnnnnnnnnnnnnnnnnnnnnnnnnnnnnnnnnnnnnnnnnnnnnnnnnnnnnnnnnnnnnnnnnnnnnnnnnnnnnnnnnnnnnnnnnnnnnnnnnnnnnnnnnnnnnnnnnnnnnnnnnnnnnnnnnnnnnnnnnnnnnnnnnnnnnnnnnnnnnnnnnnnnnnnnnnnnnnnnnnnnnnnnnnnnnnnnnnnnnnnnnnnnnnnnnnnnnnnnnnnnnnnnnnnnnnnnnnnnnnnnnnnnnnnnnnnnnnnnnnnnnnnnnnnnnnnnnnnnnnnnnnnnnnnnnnnnnnnnnnnnnnnnnnnnnnnnnnnnnnnnnnnnnnnnnnnnnnnnnnnnnnnnnnnnnnnnnnnnnnnnnnnnnnnnnnnnnnnnnnnnnnnnnnnnnnnnnnnnnnnnnnnnnnnnnnnnnnnnnnnnnnnnnnnnnnnnnnnnnnnnnnnnnnnnnnnnnnnnnnnnnnnnnnnnnnnnnnnnnnnnnnnnnnnnnnnnnnnnnnnnnnnnnnnnnnnnnnnnnnnnnnnnnnnnnnnnnnnnnnnnnnnnnnnnnnnnnnnnnnnnnnnnnnnnnnnnnnnnnnnnnnnnnnnnnnnnnnnnnnnnnnnnnnnnnnnnatgcttgttcataacaagttggtggaccccctgtatagtatcaaggagaaggaaattcagaaaagccaggctgctaagaagccatacagcgactagcctgtgccaagtcacgagtacctccgagcgagacaggcaggtctttctggaaactgtaagagagtaggattacttcgcttcagttcactgtggttgctgcagacccttttggctaggaacatactggctgtggggaacattgagtttagctatggagaacagtgtttataacttttacctttttcagtcctggggtttgaacctagggccttgcacatgccaggcaagtgctctactgagctatgtctccaacttgtttacaatgtgatattttctattaaatctaatattttcaaaaaaa

SEQ ID NO: 3385 - DNA, 694 bp, Mesocricetus auratus
atggcctcagaccaccagacgcaggcgggcaagccccagcccctcaaccccaagatcatcatctttgaacaggagaacttccagggccactcccatgagctcagcgggccctgccccaacctgaaggagactggcatggagaaggcgggctctgtcctggtgcaggctggaccttgggtaggctacgaacaggccaattgcaagggcgagcagtttgtgtttgaaaagggcgaatacccacgatgggactcctggaccagcagtcggagaacagactccctgagctctctgaggcccatcaaagtggacagccaagagcacaagatcatcctgtatgagaaccccaactttaccggtaagaagatggagatcgtagatgacgacgtgcccagcttccacgcccacgggtaccaggagaaggtgtcttccgtgcgggtgcagagtggcacgtgggttgggtaccagtaccccggctaccgtgggctgcagtacctgctggagaagggagattacaaggacaacagcgacttcggggcccctcacccccaggtgcagtctgtgcgtcgcatccgtgacatgcagtggcaccagagaggcgccttccacccctccagctagagctccaacctccccctccccggggggcaggcccactacccaggggcctcctgacaccagagtgaataaagtgtgg

SEQ ID NO: 3386 - DNA, 506 bp, Mesocricetus auratus
  misc_feature (78)..(97): n is a, c, g, or t
ctgcaggcgctcgctctgagttgactgcaacgcccggccgctttgcctggaagaagaggagcctagtaaatccggctnnnnnnnnnnnnnnnnnnnnactgacttgcaatgacatcaccaaacactgagcacacctccctctctgcccccctccccccagcacccttcccccaccccagagcagctctgctgccctggtccgccaacctcacagggtcaggctgggccagctgcaaccagggcactcaagtcacctcgtagccacctccaagatgctcgcacttcctagttgtaggtggctcagggtcattcctttctctctgtccatgttccagactggtttgaatctatgtcagactcttgcatgactctccatgcccagactttttctttgttctctttgctcacacctgggaacccccctgacctcagtccttcatcccgctcccgctcagcttgctttctttgtaactagcctgtggtcccggaagtctagttaagtatac

SEQ ID NO: 3387 - DNA, 1631 bp, Cricetulus griseus
  misc_feature (95)..(115): n is a, c, g, or t
  misc_feature (256)..(274): n is a, c, g, or t
  misc_feature (585)..(606): n is a, c, g, or t
  misc_feature (1322)..(1408): n is a, c, g, or t
ccatctttgcaaaggaccaaagtagacatttctccaaagaagacatggaaatggctaacaggtatgaaggaatggcaatcaaaaccacagtgagnnnnnnnnnnnnnnnnnnnnnaggttaagagcactgactgctcttccagaggtcctgagttcaattcccagcaaccacatggtggctcacaaccaccttgaatgagatatggtgccctctgctgtcattcagacagaagactgtatacataataaacaaaannnnnnnnnnnnnnnnnnncagtgagctatcatttcatactcagcaagagtagctacccctccccccataacaagtacaaagaattctcctgttggcggaatagaaaatggtgaaacactatgaaaaacagtgtgaaggtaattacagaaagaaactaccgcacgatccccaaattcccacatctagtgatataagcgcccccccattgaaatcattatgtcaaagagataatgtcatcctctgtttattgtagcacaattaaccacagccaatgtacgcaaaaaacctaaatacttatcagtgggttattggataaagaaaatgtgttnnnnnnnnnnnnnnnnnnnnnngaaaaaaagtatgcaacacacaacaacatggataaatcgggaggtgaaattaaccctttacagggaaacagatattgcataattccacttggaggagatgtctaacaaaggtgacttagttattttatccccgggttcctagagccttgttttcacataattgttctgttaattctttgtacttttcttttcttttattagaaagctacctgtaagccctggcttggatttattttcttcttatattttaaaatgttatgacagagaccggagagatgggttaagggttaagagtatgtactgctcttgcagaggacctgagttcagttcccagcacccacactgtgtggctcacaacttcctgtaactccagctacaggggattggctgcctctggtctccatgggcacctggcactcacattcacatatcatacacagacacatacacaaataattttaaaaatctttaaaagtgttaaaggagacctaaatatgctcttaaaacacagatcacatcaggaatgaaatccactcctggtgtctgaaataattgtctttactgacctttccagcaggaaaaatgttcatctcatagcaggtaatttttcttttaggggtggggctctgtcaactttgaatgcattggaaatgtagagttttctggccttggcagaaattataaaagtgaaacaacagatgaaaacaaaacttttnnnnnnnnnnnnnnnnnnnnnnnnnnnnnnnnnnnnnnnnnnnnnnnnnnnnnnnnnnnnnnnnnnnnnnnnnnnnnnnnnnnnnnnctgtctcaacaaaaccaaacacctaagactaaaagcaaaccaaaccacagcagcaacaaaaaaaaaccctataaaacaaacaagggaacttcagctgcaatacaattaaaaagaatatttgttaagtacaggacctagaccttcaaaatagcgcttttggtacacagtgagctaaacacagtcgaggtagcaaagattataatcgtgcggcaaagacaagctt

SEQ ID NO: 3388 - DNA, 2538 bp, Cricetulus griseus
  misc_feature (437)..(450): n is a, c, g, or t
  misc_feature (452)..(465): n is a, c, g, or t
  misc_feature (625)..(664): n is a, c, g, or t
  misc_feature (1303)..(1325): n is a, c, g, or t
  misc_feature (1768)..(1786): n is a, c, g, or t
  misc_feature (1852)..(1866): n is a, c, g, or t
  misc_feature (1868)..(1885): n is a, c, g, or t
tctagatttatgatggtaaatcatggggcacggcacagcaatgagaatcgacatttatatattactttaacaacatgttaaagatgtgttaattttaaaagcaaatttatacataatagaatctcgattgaaaaaaaaaaatcacttgaatttagcatttggtggcacacacctgtgaccccagtactaggaaagttgtgtaaaaggagcaagaattgaaggccagcctaagctgcataggagactgtctaaaaaacaaaacaaaaatactactttttaaaaagtggggatggcaagatgactcagtaaatgattgctggtatgcctagcaatctcaactccatctctaggactcaccatacactccatgacaagtatacatacacacacacacacacaaataaatgcaataaaaaatttttgagtcagatgcagcnnnnnnnnnnnnnnannnnnnnnnnnnnnagagtttgagacaagcctggtctacaaagtgagtttcaggacaggcttggaaaaaaaaattgaaaaaagtaactggaaggaaaaaatataagtatctaaaaatatgttcattcatatatatatatatgtatttataatatacatatatatgtacttatannnnnnnnnnnnnnnnnnnnnnnnnnnnnnnnnnnnnnnngtacattataagcaaactcttggtaaaattggtaggccaggataggatttgtacttcctatttttctgtatcctcaaagtttttttttttctactcaggcattttacttatatgtttttgttttatgcccctagaaaaagaatcccagggtgaagcctcctgtgtgctttcatcttaatttttcatgcttcatgctgccaccttagtggcagtaaaaccaaggctcttagtgcagtaaaaacaagccggcagggtggtagtggattattctgtccattttccctaggtctctgagctgctcatcacatttggggctcaccatgccatacttgttcagcctggaagtgaggctcactttcccagctctgtgattagcaatgactgccatcaaggccatgcttcaaccgcaggtgggaaccaggtgaggtccctcgagtacaggctgataaggatggggtgtgcatctatctcctcagcatcatttgtactcctggagcaccagccaggaaattcatgtgacccatatggcattgcagaaagtttcttttttagctggcaaagaccttccctaccttttaaagattagttgctcctgggctgagtgtacagctcactaacctagtatatgaaagggtcatnnnnnnnnnnnnnnnnnnnnnnnaatcaaattttaaaaagggggaaagattcactcttgataaatgtttgaaagagaaatttctgcaaaaattaaaaccaaagtccagtttatacgaaattggcgaggctgctaagaaagttagtgatgcactgagaaacgctgggcaggaagatgaaaggaaggatttgatttaatgacgattcagagaatgaatatggaatcctcagtgctggtatgggacaggcagtgctggccttcaagggatggtctagatctacaaatcctgcttgcctgatttccaaaagttagcgcccattagccttgacaagcattgtgtttgggggagcacagacaaggcccagcggagacccttagacatggtactgtctccattctgttgctggatatttctaccttcagagcccatttttctttttcttttctttttttttcttgatttttcnnnnnnnnnnnnnnnnnnngctttggagcctaacctggcactcgctctggagaccagactggccttaaattcacagagatccgtnnnnnnnnnnnnnnncnnnnnnnnnnnnnnnnnngagtgccaccactgcccagtgagcccatttttctaagcagaaatcagtctgggtgtttgtttttctgtgtggcttattttgtgtatagccttctgtctagctctaactccagcatttagttcagaatgtctaaaatggattggctaggagccagtgagagtcaggaggggaagtagagctgctttggatctctgggcgcacctgctacagtctgaggccagatacagatgggccctcctacctgctcagagtcaggggttagggagtgggggcckgccagtctctgtgggctcccagccaagccctccatcacacaggcttacctattctgaggcaggaggcccctagtgcctctccacccaacagcagctgtggcaagcatctgcagcctacacaggaagtaccctgtgctgtccagggcctgtctgcttcccttctttacaggcacagcaggcaaagaggtgcactgcaaattgcaccatagacttggggtagaaagtgaattgctagagataaactaaaatacaagcagctccagctccagctccttacaacacaatctaacagtgatgtctgtcaccatgcctgccatctttacgtcagaatccccaagggagagatctggaaagagtattgtagacaggctatctaga

SEQ ID NO: 3389 - DNA, 3573 bp, Cricetulus griseus
  misc_feature (1321)..(1338): n is a, c, g, or t
  misc_feature (1437)..(1469): n is a, c, g, or t
  misc_feature (2239)..(2281): n is a, c, g, or t
aagcttgattctagaaaggtctgggaataggatggggcttagggaattgccctgggccagtgtccctgggaagcttcagctgttttctcccaactctagcatctgctagtagaggtctgttcctagtcagggagcagaacatccagctgagaagccatggcggaaatcggttaggaggagaaagctgtgttttgaggcagggaagtcccagagactgaagtagcagtaaggcttcaataccagaaagtccaaggccacagataacccattccttcattccccaggctttgctctgcatagacaatgaaaccccactgaaattctgcctgtgttgagtaggtgggacactgatgcttagctggaagcagagtgaacttcccaacaaccactacagagcacatgacctggaagtaagggggtgagaaagagttatatagtgaagggtgtgttgttgctggtaggacttcaagatgaaggcgttcatgaactggtttgcctgggttgggtggagaacagggttaccacctattagttggggaggtagttaggtctggacatagacctcgaacagtgtgagactgtgacccttacaattatgtcaaaatctgcatcttaccagaatataaatgagcatctttatggtcacatggtacctgattaattttgggatttattttgttcactattggaagctaacattttcacaatgtctaagggccggcttcagaatagcccactttctaagtctgggagctattacaggtgattccgagagttctgcagatttttgttggtttccattctcttgattatactgtaactttctgtgtgtttcttttctgtgtatatcacatctatcacaattaggaccattctatttgtggagtttttgcatacgtcctttcacctaactttttgttgtaaacattttcacatgattaaaaaaaatctccaagaatagtattaatggttgtatttcattgcattcatttaaacattcccatttaactgggaggtggtgggaaggcagaggcaggcagatctctgagcttgcagtcagcttgtacagagtttcaaaacagccagggctacacagagaaatcctgtcttggaaaaccaaaaactgaccaaacaaacaaaatcattcccctgttgttgggcctttatgtttccaaattttctgtggtaaatattgcaatattgaacaactttgtggaatttttcagacaaccctttatttttactattagtattggtttgtttttggtcttatttttggttttggttttgtttttgagatagggtttctctgtatatgccnnnnnnnnnnnnnnnnnnctctgtaaacaaggctggcctctggcaccgaatctcaaattcaaatcctgctggttctgcctcccgggtatctgggactgcccaggctcagagaactcnnnnnnnnnnnnnnnnnnnnnnnnnnnnnnnnnacagttttgtgattcccaccccctgaagaaatccctagaagctgccatgggattagctgggtctgcccatcctcctgaattctgattgagaaaggtataacttctttctttcttttatttctttctctttcttttaaacatgtcttcccttctcttgcaggcatctgctgagagtcacaagttgcatgccctgagcttttcctttaaacaccaataaaattattttttgatcttcaaaaaaaaaaaatagacttgttaggagtcaaaaacagtaaaacttgagacccttgattatattttgctagatggttcttagattatattagtgtttatggccacataacctgtgtctagttcaacacaccctcatctgtactgagagcttctaatggccctgttttgatatttaaacataacmaagtaagaacaaggtatctcttgttctattttagtctttgatgctctgtgaactggatttcccccactgccttcccaagtttctggaggccactgtagggggtttcttgtttgtgtttttgtctttttgcctgccatggtgggcattgcctctcacgtgtaagacagagggatgctgccacccagccctcaccccaatcccaaggcaattatttgcaaagtttaagacaggtgacaggagacaccctagaggccgcctcagatatagagagaatggggctcagacccagagttcagggtggggacaggagggaagggatgtagtgtggggaggtaagacctttagaacagcnnnnnnnnnnnnnnnnnnnnnnnnnnnnnnnnnnnnnnnnnnnggcaaaggactccctcaagggcaagggaacaattgcttctcataaaggtaattacttcataaaggtaaggggacttcccttacaggtttcctttaggtaagactggcccttgaatatgggaatgctggtttgggagggccggctgtggccctgtgcaaacacttaacccacaaggagagtcaatgagttgcattaaggatcccagaccaaagcaatgttacatgaacactgattgggtagtaacttacaggccagacacaggtctaagcacttataattaactcacttatcttcaccagtatcatatagagcagatactcattttacagaaatagcaccgagaatttcagcgccagtcaggaagtaggtggcgatgcctgaatttgaacctagacattctggctcgtctaacctcaacatagaaactaacgtgggatgaggaagccagccttcagggccaatggcttatagaaggaaacagactcaggtgggaatgcggggaatgcaagggcagggcttctgcttaaaatggattctgggaccctaataatagctttctgacttgtgccaggcattgtgcaaagggactttacattcaatcttcagtaagtcctttgaatgagacactatcattaccttatttcatcttactgatgaggaaactgacccacacgaagccscccmagacggaagggccaagccaggccaaccctggccggggtggcgcccacgtggcgttaaggaaacagggaaaatggtgggggtgtggccagagggccgggggcgtggccgaaacggggsgtgaccgcagacttggcggggcctggggcaagcgaggttggcgcgcagccgggaaggtttaggcggggtcgcacctgttgcgcgactgccccacggccccgccacgggattgggatctctaattgattcccagaaactagtgaaagaaccctaggcgaattccgggttcggttttctgtggagcacgtggcctgcttcctcttgagtgcgggctgggggtcgcgacaccggggtctcctgaggtcagtctggcagctgaagcccgtgggagtccgccttcgtccagctggccattttgagaagcagccttccttcccgcctcagtgcgggtgcaggggccaggggcgcgacttcgcccctgtgggccctctcctctcctcagccgcgcttccccgcggtgtagactaggcagcctccctggtaccactcgggactcgggcagtatggcctcaggtaagcgtgtggcgcgtgtgttggcgttagagggatcc

SEQ ID NO: 3390 - DNA, 8567 bp, Cricetulus griseus
  misc_feature (370)..(453): n is a, c, g, or t
  misc_feature (2010)..(2036): n is a, c, g, or t
  misc_feature (2582)..(2614): n is a, c, g, or t
  misc_feature (5493)..(5515): n is a, c, g, or t
  misc_feature (5794)..(5811): n is a, c, g, or t
  misc_feature (6507)..(6539): n is a, c, g, or t
  misc_feature (8417)..(8458): n is a, c, g, or t
aaccttcagctctccaatgcaagtgaatccacaggaacagagacttttaggtgatgagctcttcagaaggtaagaagatggccatttcctcccagagccccagtacctgcattctaccctgctgtgtcaaaacccagatcatttccctcactgtagaccgtcagagtcttcgaccttttactggcagagcttttaattggcttaccctgtcatgctgctagatataaagacaatccctagattaagaagtagttctccagctggagtagaagagtctcaaaccacggtaggcagagagcaagaactagaagtctgcactctcatccaacttttatgggagcaagacaatgttactctatcccatcctggnnnnnnnnnnnnnnnnnnnnnnnnnnnnnnnnnnnnnnnnnnnnnnnnnnnnnnnnnnnnnnnnnnnnnnnnnnnnnnnnnnnntgtctcacagacaggagccttactggaaaactttaagagctagagaaagcagtttttctctgaggagacaacagagatggggagtggaatcagtgctgaggacaaagaacttgccaagaggtccaaggagctggaaaagaagctgcaggaggatgctgataaggaagccaagaccgtgaagctgctattgcttggtgagtgacatgagcagatgaactagtggttcattttctttgattttctggtgggttgatgggggctggccaaccccacatgtgttcttctcatcctggtccagtctcaagctaaaaaaccaagcagagcttagagctaagttaatatggagcctgcacagtcaccacaagggacccagaatgccaggggcactggaattgttttacttttccttgaactatgaatagtgcaaagacaaagctgggctacccaactgcaacaacagcctttttttggttcaacaactaccaagaaccctggccatgcaggcacacaccaatcctgctgtcagaaaactatggcatacaataagtaaacagaactctttctcagccatggatccataaagtcacatgaccccaacacatagtctcaaggataagcctactgatctctgccatgtagactggattcttgtccttgctttcaaaataaattgctggagaacctggtagggaggggagggccacaggaaagatggaatctttaacaacagaatgccctcctggctttctagtaagaaattgccactgacatctggaaggctcgtcaacttgacacattctaagcacatcactggttggtgcagagatgagaaaaggacctctgtaggtcaatcatggaagcagatcatggtttcaaatagaaaataagaaactgacacctggctcaagaaaaaccccagaaacaaaaacgccaatggtactactgaggtggggttgctggatctatgcagcagaaagctgtctgggtttctctaaagaacctgggggccggagcagtaaagcaaaagggtgtgggggtcggtggggcctatttgtaagctggacccaggctctgaggaattcagcagtcacatacaggaacagaggctgacagacagatcttttaagcctaagcagattgtctaggttcaggataagcagcttagaagaaacaagcacaggcaaggtgggaggagacttagggatcaggaaggaatgtgagttcttgatgggtaagaggaccgcctaaataaggacattagaatgttttagtcaataacagacaccatcatggtagggaaaattatctcagtgaagagccccagctctttccaatcctaatcaagattattgcctgtgtcaaaaataggcagtgtgaatattttaaaggaatttatatgatctatcagtggttcccaatggagagacttcttgagtcccagaggccacaaaacatttggagatacttggttgtcacaactaagagtgggatgttagtggcctctagtgggtagagacaaggaatggttctaaacagcttacaatgtataggacagcnnnnnnnnnnnnnnnnnnnnnnnnnnnccagtcctcagtgcaaatagtgttaatggggacaagctgctctaaatccaggttgaatggcctgagctcatggtgtctctcggtaagtctcccagaaagcactgttcacataccatcttctggaccattgaggagaactggtgggaactgacagcatggacatttcccttccaggtgctggagagtcaggaaagagcaccatcgtcaaacagatgaagtgagtggcaacataacgggggggggggaccaaggtgtgggagtcagtggagcgggtcatgatgttgagcagaagggtccttagctccaaaggacctgattttccacatccctccccttaccctgcacttggagacagcagtagaagaaatacaggtggtttcctatgacccttatatcctccccagaattccaatctcttaggtctggttcctcaggccctgctaaaagtttagtgtctgttccttgaaggatcattcaccaggatggatactcaccagaagaatgcctagagttcaaatctgtcatctatgggaacgtgttgcagtnnnnnnnnnnnnnnnnnnnnnnnnnnnnnnnnntaggcattgactatgctgaagcaagttgtgcggtacgtgattaatgttatctggttcagggtggaagcaggagaagaaatagacaagagagcaacaaaccacaaggtaagtcgggtaagaaaaagttctgtgtaactcaaatcgcatctgctaatcttcaaatcatcttagtcctaggagagtaaacaacctctacctttataacaaatgtttacaaattcaaaccccagcaactttttgctttttaatcttattttatcacttaaattctctctctgagcttcttgcactagccatgggacttttacaagctatacactgaaatacactaggttatgtattgcagggccgattttaaattgccagtccctgcagcaaaggacctatcatttcagcctaacctgaaagatcatctgggactgtcctctaggcgcatcccagggctggctacatctgaagtaaattagcatgtttccttaaactgtgcctttactcagactgttctaccttaggctttggtagcaatgcagcatgctttccgttcagtaagttcccagaaaccacctggaaagtcactaaagtcctccccgctcattctcaaccacatttctggattacacaggattcgggtcgacagctcaacaacctggccgactccactgaggaggggaccatgcctcctgagctggtggaggtcatcaggaagttgtggaaggacagtggagttcaagcctgctttgacagagctgcagagttccagctcaatgactcagcgtcttagtaagactatggggaggaggggggaatgatgctcaggagaaatctcacccagccttaagttccaggcagtgggagctgcagacccacaaactgaactatagagacatcggcccgtttccctgttttgcatttctttatactgcctctctgcagcctatgaagctgaagatacaaaattcaaaacaggagctctgcttagcagtccttggccctatctcaagaggcaaaccaaagaaagatggccagacactgagaccatcaactttgcaaagctggttccaaaaagataagggacacagttatcaaccctcaacagtgcagtaccagaagtgggcatgagttttaagaccaaacaaacccatgtttaccctgttacctcatcttgcaataatgttatcatttagtttctggaatcctctcttccctgctaggtgcacaacatacactctatctcagggcccttgtttgtacactagccttcaagatacattaaccccattttctagtagaaaacctgcagtcagatgaagttagttaacttggcaaagactgtgtacataaacagcagaggctgcacttgggttcaggtccacacaactacaaagctgagtttctatagtatgccactgggctttttttctttctttctttttttaaagattttatttatttatgatgtatacaacattctgcttccatgtatatctgcacaccagaagagggcaccagatctcataatggatggttgtgagccaccatgtggttgctgggaattgaactcaggacctctggaagagcagtcagtgctcttaacctctgagccatctatccagccctgccactgggctttcttatttcaggttgagatacagttttactttgtagccaaagctggcctgaaactcagccctcctgcctcagtcacccaagtaatccctccgaagttctcctttatctataaagtgggaacatgagtctcctagtcttctaggatttagtgagaatttacttgtgagaatatatggcatacaacagaaatgtcagttttccttccctctccatattaagtcattttacttcatatctgcctctttgtaccctttgtgaaccccctcatgttcttatgaaaacttctaaacatacaaaagtggaatacacagtgaaccgtccagtttgcagttgattcatggcctttcttagctcacttaacacccctcccactggattattttaaaatactctgcagctatcacttcatcctaacaatttcattatgtatttaaaatgcaaagaagaaatcatatcatcatacctaaatatttaataatgccttaatatctccaaatatcaaagtgtgttcatattcctgtttgactcaggagagaaggtgcacacactgccttgtcttgtgtcttcagattctctttcaatctatttcctgtctcttgatggaactttggacacatatataaacaagtcttattcaagggtctagaaaggcttagtcaggagaacagaacacttccctcctggaggtgtggcccttcaccctctttctttcctgagaacacaagggtttgcacagccctggattcagggctgtggaattccagtcctgcttttatcactgtatcagctgtgtgacttagggggacaaccttggcctcctttagccttgacttcgaagactgtaatatcaccaatgccactctcttttgctagctacctgaaccagctggaccggattacagaccctgactacctccctaatgagcaggatgtgcttcgatccagagtcaaaaccacaggcatcatcgaaaccaagttttctgtgaaagatttgaatttcaggtcagcattcagtcctctggggcatcccaggtctcacagcatgtttcttggcctttgctgaagcccaatccaaattactgttctcctcctttcgcttctcctgtttctgattttgctactaactggccccaccaagcagccgcctctccgggtgaataccaaaggcaagtgagtcacatggtggccacacccatgagaacagccgtttcttcccttaggatgtttgacgtgggagggcagagatcagnnnnnnnnnnnnnnnnnnnnnnntttgagggagtcacctgcattattttctgtgccgctctcagcgcctatgacatggtgctggtggaggatgatgaagtggtgagtggtgtttattccagtttcagtggcattggatttcatgtgccgctctcagtgcctatgcatggtgctggtggaggatgaccaagtggtgagtggtgtctataccagtttcagtggcactggatttcatgacccccttctccaaaccttgtcatttcactgcccaactggctaacactgacagcctaggcatctccnnnnnnnnnnnnnnnnnnctcagtttactaataactccagaaaactccttttctgctgtaggttctaggttagcacttcaaagctccaaatttactgagcgtgagttcggtctgagaataggaatccaagcattttaaagccatcacaaagctcaagaggaagtgatactaagtggaggcagagagatgaagtaggcagtgcagggacttaagaagtctatctatatgccagttcccttctcccgagttttgagatgaagtcaaagatgtgaaaacactaatgtccatgttggccagctactcaacagaaaatcacagcttttagcccactgtcactccagctttggttctctttccttctccttaactggtagggttcacaatggagcactctgtaccttttagccaaaatgtcttatagcatcatcatttacattccaagatcacttccattttaccccaagtttaccaggtacttaactatcaacagcaggagcattgacagtgaggaaaggctgcatatcagttttccctgattagatgacaaaaatgaattcaagtcagctgatggcacacttcaggtccctactggcctattccctaaatgctcacctgatgtgggtactggctaatgctggactctgcggacacatgtctctcctctttcaaagtagctatgagagaagaaggaagaagtgctgatggtttggtacnnnnnnnnnnnnnnnnnnnnnnnnnnnnnnnnnggggctaaagaatccatgtcacagtcatgccccagatgaaatctggcatcccctgacataagctagcaaaagcaagtaacaaagtgctaatctgggcttggttgcaggccccccggatattacctggctctggcagctaaagatctccacatacagttattcttatagccagctactaccatgggtacacagacacatgtcctctttagcattcataactatgaggaaacagagactctgggatgctaataacctccctcaaatctgagctattaaaatgacagaaaggaaatttgaatgtttggttgtaccccaccacactaaaaacagatgatctgttcccttgctttacctttatatttggaacactggtctgttcagttagaacaggaataaacagacgcctacatcccacaagctgatctgctattcccacaatgtttcttcaccagaatcgcatgcatgagtctctgcacctgttcaacagcatctgtaaccacaagttctttgcggccacttccatcgttctcttcctcaacaagaaggacctctttgaggagaaaattaagaaagtccacctcagtatttgttttccggagtatgatggtaggtgccaactgctgcagacaagagtgatgtagtaataggattgcctcatcccataggccaaaagcacaaaaaggaacttaccaggcaaaggaggagacacagagacctttcctccttttccttgtttcactcaagtgagaagtaccggcaggctccacagagcattactcctgacagccacctgcaggcaggacagtccccactcccctgacagtcacctgcagggacaacaaagcccccagctcccctgacagtcacctgcatgaatgacagagcccccactcccctgacagtcacctgcatgaatgacagagcccctgctcccctgacagtcacctgcatgaatgacagagcccccgctcccctgacaatcacctgaccacgatctgtctaatgcaatacttcaagaagcaaattagacacctgaaaattgagcacttagggtgatttattccattttactaatttcttttaaaccagggaacaactcctatgaggatgctgggaattatatcaagagccagttccttgacctcaacatgaaaaaagatgtcaaagaaatctacagtcacatgacctgtgctacagacacacagaatgtcaaatttgtgtttgatgcagttacagacattatcatcaaagaaaacctcaaggactgtgggctgttttaatgctcaggtttcctcagatgtacattctacaagcaggcttagaaactgagaggctgtttacagaaaactaatcaacaagaaccagcacatgacgaataagcccattttgttggagacacagaaggcatgcttacaactgttttcaagtagtgtggctagtacagtttaaagaatgtgtggccaagaatcgtaagacccaggctccagtactggttctgcttagcacagtagaaatttttctgtagcaaaattcccctcgcctatataatgaaggtcacttccttacctacttcacagggccattctcaagagcacaaatctaactgaagggaaagcacatggaagctgctgtggttggcggcaaccgatgtactatcacacttggttattagaataaactatctcaaagtgtatcagcaaaacttccttacattgatcgataaactattaaaaattaaaccctgccccctgggtttttactagcagatcaatatgcctctgctcagagacccgcatcactggagaaagcatgtgagtcctgcctcatttcttagggcattcattcagaaatgaccgtctttattatcccactctcccnnnnnnnnnnnnnnnnnnnnnnnnnnnnnnnnnnnnnnnnnntatactgttaagtagtgtctggctgaacttgagggcatcagcataccccccacttaagacgttaccaccgccacttctgtaggatttgaacaagcaagcaatctgaatt

SEQ ID NO: 3391 - DNA, 1097 bp, Cricetulus aureus
  misc_feature (1039)..(1097): n is a, c, g, or t
gagacgcgcttcttcggccgtgccccggcgctggctgattgttgggcggccggcgccatgtctgtgagcgagatcttcgtggagctgcagggctttttggctgcggagcaggacatccgagaggaaatccgaaaagttgtgcagagtttagaacaaactgctcgagagattttgaccttgcttcaaggggtccatcagggcactgggtttcaggacattccaaagcggtgcttgaaagctcgagaacattttggtacagtgaagacacacctcacatctctgaagaccaagttccctgcggaacagtattacaggtttcatgagcactggcggtttgtgctccagcgtcttgtcttcctggcggcctttgtagtatatttggaaacagagaccctggtgactcgagaggcggttacagagattcttggcattgaaccggatcgggaaaaaggatttcatctggatgtggaagattatctctcaggagttttaattcttgctagtgagctgtcgaggctgtctgtcaacagtgtgactgctggagactactctcggccccttcacatctctactttcatcaatgagctggattcaggtttccgccttctcaatctgaaaaacgactccctgaggaagcgctacgacggcttgaagtacgatgtgaagaaagtagaggaggtggtctatgatctttccatccgaggcttcaataaggagacagcagcagcttgtggtgaaaaataggagcctctccctgtggctggccttgccgactaggcatttgccagggagggctagcacagtgcctctcctctagttagcacgccagttgctaaacactgcgctttattttcgtaaccagctgtgtggcgtgaatatcagaattgagatactttttggatctaaaaaaaaaaaatcctttccactgataggattttctttgttgacgtttcagtgaacttgctgtgtaatttgttgtagtatcattttgtcaaaagtgtaaatgttggtctcttggtaaaagtccttttcttgcttnnnnnnnnnnnnnnnnnnnnnnnnnnnnnnnnnnnnnnnnnnnnnnnnnnnnnnnnnnn

SEQ ID NO: 3392 - DNA, 369 bp, Mesocricetus auratus
cctgccctgaagggggaaaatgaggaaatctggcacgtggtcacccggaggggtggtcgggtgccttcctaacgctccagtccgggtgctgggcgcctgcatcccccctacctctgcagacagggtcttccagggcggctcgcccgcgggaagcgtggaggctgccatggccacgtccggctcagaggccgagctcctggctttgcagggacacgaggaggcagggggcggggcccacacgcgccccgccctcgccacgcccctgtctgcggcttggattggtcggtgagtatttaaagaaaagcgcgaaagcgaggtcgctttccactcaccgaccccggccctctccgctgaggctcgcacagccgc

SEQ ID NO: 3393 - DNA, 308 bp, Phodopus sungorus
ccagttctcccaggacattggacttgcatctctgggagcctcagatgaagagattgagaaactctctacggtgtactggtttactgtggagtttgggctgtgcaagcagaacggggagctgaaggcttatggtgcagggctgctgtcctcctatggagagctcctgcactccctgtcagaggagcctgaggtccgggcctttgacccggaagcagccgctatgcagccctaccaagaccagacctaccagccggtctactttgtgtcagagagcttcagtgatgccaaggacaagctcaggacctatg

SEQ ID NO: 3394 - DNA, 1161 bp, Cricetulus griseus
  misc_feature (743)..(758): n is a, c, g, or t
ccacgcgtccggacagatcaaggacagaaatctctgtcctttctgatcgtgttacagatgtaggaagtgtagattttccaggttattattttgatgaagacaacatctgggatcttgataaatttaaaaaaaatttaaaagtttcgattacgtctctcgatcaagaaacaatggtatttgaaatttctggaattgatgcatccattgcaaatgcatttaggaggattttaatcgccgagatcccaactcttgcatttgagttcgtgtatatcataaacaatacgagcataatacaagatgaggttttgtctcacagaataggtcttgtacctatatctgctgatcctgacatgtttaaatggtttcaacatcctctgccaggacaagaggcaactcatactgattacgatactgttgtcttttcccttaataagaaatgcgagtttaataagaatgccgctacagatgaaaaagatccaaagagactttacgttaactctgaggtttattcgggtgatctaatttggaaaccgcaaggtcgacaggaagagcgatttgctgacaatcctatacgagtagtcaacccagatattgttgttgcaaaattgcgtcctggccaggaaatcgatttagaagctcatgcaatcttaggtattggacaagaccatgctaagttttctcctgttgctactgcctcctaccgcttattgcctactatacatatcttgtctcctattgaaggnnnnnnnnnnnnnnnntttcaaaaatgcttccctaaaggagtcatcgagcttgaggaaggacctgatggtaaaaaacaagcccgtgtagcagacgttcgaaaagacaccgtatcccgcgaatgcttgagacatcccgaatttgcagataaggtgcaattaggccgcgtacgcgatcattatttgttttctgttgaaagcaccggtattatgaagcccgatgtcttgttcattaaaagcattgcagtcctaaaatcgaaatgtctagccgtaaagtctagtcttcagaatattttttctgactgaatgtctgttaaattagttttatatgtaatcttttggataattgggtacgctgttaaaaaatatacttttgaaagttattgatttttatatttcaatattaacattttgtcctttc

SEQ ID NO: 3395 - DNA, 665 bp, Phodopus sungorus
  misc_feature (224)..(242): n is a, c, g, or t
aactggaggaggacgagtcggcagcagccagcaccatggcagtctctgcctccctcatgccacccatctgggacaagaccatcccctatgatggcgagtctttccacctggagtacatggacctggatgagttcctgctggagaatggcatccctgccagccccacccacctggcccagaatctgctgctgcctgtggcagagcttgaagggaaggagtctgcnnnnnnnnnnnnnnnnnnnccaccatcctcctctactgctgtctttcagccctcggaaaccgtgtccagcacagaatcatccttggaaaaggagagggagactccaagtcccattgaccccaactgtgtggaggttgatgtgaacttcaatcctgaccctgctgacctggtcctctccagtgtgccaggtggggagcttttcaaccctcggaaacacaagtttgcagaggaagacctgaaaccccagcccatgattaaaaaagccaagaaagtcttcgttcctgatgagcagaaggatgaaaagtattggacaagacgcaagaagaacaatgtggcagcaaaacgctcccgggatgccaggcgcctgaaagagaaccagattaccatccgggcagccttcctggagaaggagaacacagccctgcggacggaggtggctgac

SEQ ID NO: 3396 - DNA, 714 bp, Cricetulus griseus
agctgcagcgcttagagggaggagtggcggtggcgcgtcacctggcagcggcgtagcagcagtgaagtatttgaagtaaagaagaaagcacaatgtcctcagtgttttctgaatacaccattggtggggtgaagattaactttcccttgtaaagcttatccagcacagcttgctatgatgaactttattgtcagaggactaaacagtagtcagcattgtttgttggagagtcccacaggaagtggaaaaagtttagccttactttgttttgcattggcatggcaacaattttctactggaaagccggtggatgagggcttgaataaaaagcttgaggtgccatcatcatgctgttgtgcatgccattcaaagagctttatgtacagcaacacggacatgggtacttcccctcatttcagtagtccaagcaaactgtctgagagaaatggcttttcaccaccctgtcaagattctcctgaaaaaaatactctggctgcaaagttatctgccaagaaacaggcatctaaacacagagatgaagatgatgattttcaaatggagaagaaaagaatccgacccttagaaactgcacagcagatgagaaaacgtcattgtttggaaaaggatgtccaccatttggatgcacgggtagcttcggaaaagaaagtaaaacctgagtctcctgtaggaaagacaagctcctctttccaaaat

SEQ ID NO: 3397 - DNA, 1959 bp, Cricetulus griseus
  misc_feature (349)..(363): n is a, c, g, or t
  misc_feature (1722)..(1783): n is a, c, g, or t
  misc_feature (1939)..(1959): n is a, c, g, or t
gccgcagccagctgtctcctcctagcgctgctggggcggcgggctatctaggccggcgcgtctctatggctgcaggggcggtagttccgcaggctatctctgcaccatggctcaggcgagagaaaatgtcagtttattcttcaagctatactgcttggcagtgatgactctggtggctgcagcttataccgtagctttaagatacacaaggacaacagctaaagaactctacttttcaaccacagccgtgtgtgtcacagaagttataaagttactgataagtgttggacttttagctaaagaaactggaagtttgggtagatttaaggcatctttaagtgaaaacgtnnnnnnnnnnnnnnnggaactgatgaagttaagtgtgccatcactggtgtatgctgttcagaataacatggctttcctagctcttagtaatttggatgcagcagtataccaggttacctatcaactgaagattccctgtactgctttatgtaccgttttaatgttaaatcgaacactcagcaaattacagtgggtttcagtttttatgctgtgtggtggggtcatacttgtacaatggaaaccagcacaagctacaaaagttgtggtagagcagagtccattattaggctttggtgcaatagctattgctgtattgtgctctggatttgcaggagtttattttgaaaaagttttaaagagttcagatacttccctttgggtgagaaacattcaaatgtatctgtcagggatcgtggtgacgttagttggtacctacttatcagatggagctgaaataaaagaaaaaggatttttctatggttacacgtattatgtctggtttgtcatcttccttgctagtgttggaggcctctacacttctgttgtggtcaagtacacagacaacatcatgaaaggcttctcagcagctgcagccattgttctttctaccattgcttcagtgatgctgtttggattacagataacactttcctttgcaatgggagctcttcttgtatgcatttccatatatctctatgggttacccaggcaagacactacctgcattcaacaagaagcaacttcaaaagaaagagtcattggtgtgtgattggaatcttaagatactcctataacgactaaactgtcaataataaattagagccttaagtcaaccccagatggtagcttaaacaatatcaacaaaattactgtatggcattaaggtacagagaactgtatgagtgaatgcttaacagatttatttagagtgtttggtatcaagctgtattatttcagaatgaaggactttactacagagagagagtgtgtgtgcatgtgtgtatgtatactgtgtacacagagcatggagtttacatggtatcaagaggcatgcacagaggagacaacacagggttacaacatcaggtgaaactacaatattcaatcaaggtttaagatttggtatctgaaggttcaagtgccaaagccatttctgtcacactgttctctcgttcaggtaccaggaggggaagcttagccttccttgttgtccagttcatggatagtactttgtccctgtagtagcaaaaaatctagctgcttttatcaaagtgaagaatgaataagataagacagttcagaacaaaaccagtgtgtaacttctaaaacagaacctatttcatggctcagacactgacttctgtcgtttgaatnnnnnnnnnnnnnnnnnnnnnnnnnnnnnnnnnnnnnnnnnnnnnnnnnnnnnnnnnnnnnnagctgatatacttttcagaaaattttctaagtcgcttttatactttcttttttataaagtatggttacctgttgggctctcaatttgtgaactttaagtgatttaaaatatttctataatgttaacggggaaatccagcaataaatttatttatannnnnnnnnnnnnnnnnnnnn

SEQ ID NO: 3398 - DNA, 1744 bp, Cricetulus griseus
  misc_feature (975)..(997): n is a, c, g, or t
  misc_feature (1723)..(1744): n is a, c, g, or t
tgtggctgggcgctctgacgtgagaggacatccggtctcgcttccactgtccgcggcccgtttcggcgtctcgggcgggtctccctggttctagcccgcgggtcggactcgcctctgcgtcttccaccactgcgaaagagggggaaatgccgaagaagaagacaggcccgaggaagaaggcagagaaccgccgagagcgggagaaacagctcagagcatcgagaagcactgtagacttagccaagcacccgtgcaatgcttcaatggaatgtgacaagtgccagaggcggcagaagaatagagcattttgctatttttgtaattctgttcagaagttaccaatttgtgcccagtgtggaaaaacaaagtgcatgatgaagtcttcagactgtgtcatcaagcatgctggtgtatacagtactggccttgctatggtgggtgcaatatgtgacttctgtgaagcttgggtttgccatgggaggaagtgtcttagtacccatgcctgtgcctgcccactcactgatgcagagtgtgtggaatgtgagcgaggggtttgggaccatgggggcagaatattcagctgttcattttgccataattttctttgtgaagatgatcagtttgagcatcaagccagctgccaagttttagaagcagaaacatttaaatgtgtttcctgcaaccgccttggccagcattcatgtctgcggtgtaaggcttgtttctgtgatgaacatacaaggagcaaggtgtttaaacaagaaaaagggaaacaacctccttgcccaaaatgtggacatgaaactcaggagacaaaggatctcagcatgtcaactcgctccttgaaatttggcaggcagactggaggtgaagagggagatggagcctctgggtatgatgcttactggaagaacctgtcatctgacgagtatgctgatactgggtaccatgatgatgaagaggaggatgaagcannnnnnnnnnnnnnnnnnnnnnntgggaaggattcagatgctgagtcatcagatctgttcactagtttgaacttaggaaggacctatgccagtggctatgctcactatgaggagcaggagaactaggagcagctcccgctggcacttgaagaagagcaggctgaatcatgaggatgctcagacgtcccctcccttggccttgtccaaaaggctagtcatactagggtacattctggcggtttgtaggaactgatactggacttctagtgtaaggaaaatgggttaaatgtaatggagtatcatgaattggattattactgatttcaatcatctggtaggttttgtcagttagatacatataaaatacatgataaaggaatagaaaggaaatatatttatttgaaattaaattgctgtttttattaaaagcactgcttataacttgcatgtatctgattttacaaagagtaacgggtaaaattactgtattcttttatttcaatccatacaatgatagtcatgttatattctgaattttcactgactatttatgctgtcttaagtagtcgtatctgtgttaagtggttgacgtgttcatctttttcttacaatgtatgtcctcaccagtgcttgttaatgcctcactgactgacagaaatctagctgttttcatacacataatgccaggactagtattgctgatgcttcacccagagaacttcacttttaaaataaatctactataaacnnnnnnnnnnnnnnnnnnnnnn

SEQ ID NO: 3399 - DNA, 2142 bp, Cricetulus griseus
  misc_feature (2081)..(2098): n is a, c, g, or t
  misc_feature (2117)..(2142): n is a, c, g, or t
gctttgcggttccaacatggcggacgtgacggtggaggttcgtggctccaacggggctttctacaagggatttatcaaagatgtccatgaagactccctcacagttgtttttgaaaataattggcaaccggagcgccaggttccgtttaatgaagttcgattaccaccaccacctgatataaaaaaagaaattagtgaaggagatgaagtagaggtatattcgagagcaaatgaccaagagccatgtggatggtggctagctaaagttcggatgatgaaaggagagttttatgtcattgaatatgctgcttgtgatgccacttacaatgaaatagtcacatttgaacgacttcggcctgtcaatcaaaataaaactgtcaaaaaaaacaccttctttaagtgcacagtggatgttcctgaggatttgagagaggcgtgtgctaatgaaaatgcccataaagattttaagaaggcagtaggagcatgcagaattttttatcatcctgaaactacccagctaatgatactgtcggccagtgaagcaaccgtgaagcgagtaaatatcttaagtgatatgcatctacgaagtattcggacgaagttgatgcttatgtccagaaatgaagaggccactaagcatttagaatgcacaaaacaactcgcagcagcttttcatgaagaatttgttgtgagagaagatttaatgggcctagcaataggaacacatggtagtaacatacaacaagctaggaaggttcctggagtaactgctattgagttagatgaagatactggaacatttagaatctatggagagagtgctgaggctgtaaaaaaagctaggggtttcatggaatttgtggaggattttattcaagttcccaggaatcttgttggaaaagttattgggaaaaatggcaaagttattcaagaaatagtggataaatctggtgtggttcgagtaagaattgaaggagacaatgaaaataaactacctagagaagatggaatggttccatttgtgtttgttggcactaaagaaagtattggaaatgtacaagttcttctagaatatcacattgcttacttaaaggaagtggaacaactgagaatggaacgcctgcagattgatgaacagctgcgacagattggttctaggtcttatagtggaagaggcagaggtcgtcggggccctaattacacctccggttatggtacaaattctgagctgtctaacccctccgaaacagaatctgagcgaaaagatgagctgagtgattggtcattagcaggagaagatgatcgagagactcgacatcagcgagacagcaggagacgcccaggaggaagaggcagaagtgtttctgggggtcgaggtcgtggtggaccacgtggtggcaaatcctccatcagttctgtgctcaaagatccagacagcaatccatacagcttacttgataatacagaatcagatcagactgcagacactgacgccagcgaatctcatcacagtactaaccgtcgtaggcggtctcgtagacggaggactgatgaagatgctgttctgatggatggaatgactgaatctgatactgcctcagttaatgaaaatgggctagtcacagttgcagattatatttctagagctgagtctcagagcagacaaagaaacctcccaagggaaactttggctaaaaacaagaaagaaatggcaaaagatgtgattgaagagcatggtccttcagaaaaggcaataaatggtccaactagcgcttctggcgatgaaattcctaacgtaccgcgtactccaggagaagaaaagactaagaacttaaaagaagaaagcactcaagaagcagcagtcctgaatggtgtttcataactgaaggaagttcctagtttacagttcttttacattacagttacaatagtgcttgtacaagcttgccaaagatagaatatggatcgccagtctttacatcgcactttcagttcctccatttggaattcagaaaggggagggatcctgaagaaatcatatgttaaacatactttgacacctactgtgttaaaaatatatnnnnnnnnnnnnnnnnnnaatagtatatgtaacattnnnnnnnnnnnnnnnnnnnnnnnnnn

SEQ ID NO: 3400 - DNA, 1491 bp, Mesocricetus auratus
ctggaaatgctctttacaaggctactctgtggaggaacagctaaagaactctctctacagtgatggctacatccatctctgtgctggggtcaggccagagacacagaagtgagccaagtctacagttagaactgagctaatggacaggacagttcaagaacaacaaaaaagcatcctcatggcccaccactgggaagcaggcaaaccgaaatgctcacagcttaaatccctcctattgtatccttagatgcaaacagctctggggaaggtagaaccttaagcaaggcaacctctgtagcaggggcagaccctgcagttactggaagctgaaggctctcagatgaccacatccctcacagccactagacagaaagatcatgagcgggccctttaaactcctctccaggtcttccccaattcccagccccaccactccatagtaggtaccaggcatctattgactgggtggatggatgaacatttgagatgatctggaagtctgaataggatttgtggaaatgggaaatggctgggagggatgcaagctgggaagctgagacagaaggtgttggttgcaaccaaagtgaggttacatgctaagacacaagagcactagagagtaaacacagagcatgggaagctaaagttagagcctgggaactactaacacttgagaactgtcaacatctagaaagaatagccaaggaagggaaacaggaaaatgcagagtgtgggaaagaatggagcaggagagaggaggctatagcataaaggctagggagaggtcaagtcagataaacactgaagtgcccctcaactggccattagaaggacaggactgggtaagaacagaccaagcctgacctgggcctgggtctctgatatatactatggagaagtcttcatttgttcatgtctaatgcagaatctaacctgaccaatgacacccaagaatcaagtgacctagccactttccttggaggggggcagtagaaggagctcagtgacattttagagtccttggtctttgtctaccttgtattcctgaggagccaccaccctctggtttgccaaagttggcaagtctacagttgcttcctggaacctggagtacccagtgcttgacttcaaaaagaggacacagatgtccagattcccacaacctctgacttgggctcccccccactgcctggacaccccaaaagtggcctgttgttgagctcagtttcaatgggaacagaaactgggtttaaggaaagagattatttacttattccacagagaagataaccaagtaaatagtgcaatatcctaagtggtacccaagccctgcctactacctcttgtgggcttcctagaacatataaaaagccacctgatgcccccacacttatacacactactataccaccccacatccagagacagccaagcctcccagactccaccatgaagattgccatcacaatggctgttgtcatgctgtcggtc

SEQ ID NO: 3401 - DNA, 2056 bp, Cricetulus griseus
  misc_feature (1327)..(1345): n is a, c, g, or t
  misc_feature (2036)..(2056): n is a, c, g, or t
aattcggcacgaggcaacttggtggaggagaagtccagcatgatccgcaagtccttggagatgctggagctcggcctgagtgaggcgcaggtgatgatggccctgtccaatcacctgaatgccgtggagtcggagaaacagaaactgcgcgctcaggtccgccgtctgtgccaggagaaccagtggcttcgggatgaactggccaacacgcagcagaagttgcagaagagtgaccagtccgtggctcagctggaggaagagaagaagcacctggagttcatgaaccagctgaagaaatatgacgatgacatctctccctcggaggacaaagactctgattctaccaaagagccattggatgacctcttcccaaatgacgaggatgacccagaaccaggaatccagcagcaacacagcagcgctgcggccgccgcccagcaggggggctacgagatcccggcacgcctgcgcacgctccacaacctggtgatccagtatgcttcacaggggcgttacgaggtggcggtgcccctctgcaagcaggccctggaggacctggagaagacttccggccatgaccaccctgatgtggccaccatgctgaacatcctggccctggtgtacagggatcagaacaagtacaaagatgcagccaatctgctgaacgacgccctggctatccgtgagaaaaccctgggccgagatcaccccgcggtggcagcaactctcaacaacctcgcagtactgtatggtaaacgagggaagtacaaggaggcggaccggctgtgtaaacgagccttggagattagagagaaggttctgggaaaggatcatccggatgtagccaagcagttaaataacttggccttactgtgccagaaccagggcaagtatgaggaggtggagtattactaccagagggccctggagatttaccagacaaagctaggacccgatgatcccaatgtggccaagacgaagaataacctggcctcctgttatctgaaacaagggaagttcaaacaagcagaaacgctgtacaaggagatcctcacccgtgcacacgaacgggagtttggttctgtggatgatgaaaacaagcccatttggatgcacgcggaagagagagaagagtgcaaaggaaagcagagggacgggacttcttttggagagtacggtggctggtacaaagcctgcaaagtggatagtcctactgtcacaaccactttgaaaaaccttggagcactttaccgacggcaggggaaatttgaagctgcagagacattggaagaagctgccatgaggtcacgtaaacagagagtggctnnnnnnnnnnnnnnnnnnnagaacatgcagaagcggaggagccgggagagtctccactcggacgtggtcaagtacgagagtggccctgacggcggggaggaagtgagtatgagcgtagagtggaacggggatggcactggatctttaaagcgcagtggctcctttagcaaactccgggcttccattagacgcagcagtgagaagctggttaggaagctgaagggaggaagtgcacgggacagtgagccgaggaaccctggggcgtccccagcagagcctctttgtgtggaaaacgtacagcagcagcctagaagacgctagcactaactgacctgagcctggcctgctctaaacaccatgatgctgctgagtatggctccagagctggccctgtgaaggccatggtggggctgggagggcctgcggctgggagcccagtgctaacttagtccccctgccctcgtgctgcgcgaccactactaataaccactaccactaggagggttttggagagcagctctcacgcagtaaggtggtgacctgcccctgtccttcctgggaggccccgggacaggacacatcggctcctgctgcttctgcctggccgtcctgtggcactcctcatgtgtttagttctctgtgttgtgtgtgataatgtattttattgttacatttttaaattaaaagttatatgccttttacgtttaccnnnnnnnnnnnnnnnnnnnnn

SEQ ID NO: 3402 - DNA, 1710 bp, Cricetulus griseus
  misc_feature (1235)..(1264): n is a, c, g, or t
  misc_feature (1688)..(1710): n is a, c, g, or t
aagaagaaggacattttttttaaacaaggaccaccctttactgaaattaccatggttgacacagagatgccattctggcccaccaacttcggaatcagctctgtggacctctctatgatggatgaccactcccattcctttgacatcaagccctttaccacagttgatttctccagcatttctgctccacactatgaagacattccattcacaagagctgacccaatggttgctgattataaatatgacctgaagctccaagaataccaaagtgcgatcaaagtagaacctgcatccccaccttattattctgaaaaggcccagctctacaacaggcctcatgaagagccttccaactctctcatggccattgagtgccgagtctgtggggacaaagcatcaggcttccactatggagttcatgcttgcgaaggatgcaagggttttttccgaagaactatccgattgaagcttatttatgataggtgtgaccttaactgccggatccacaaaaaaagtagaaataaatgtcagtactgtcggtttcagaagtgcctcgctgtggggatgtctcacaatgccatcaggtttgggcggatgccacaggccgagaaggagaagctgttggcggagatctccagtgatatcgaccagctgaacccagagtctgctgatctccgggccctggcgaagcatttgtatgactcatacataaagtccttcccgctgaccaaagccaaggcgagggcgatcttgacaggaaagacaacagacaaatcaccttttgtcatctacgacatgaattccttaatgatgggagaagataaaatcaagttcaaacacatcacccctttgcaggagcagagtaaagaggtggccatccgcattttccaagggtgtcagtttcgatctgtggaagctgttcaagagatcacagaatacgctaaaaatatccctggattcattaaccttgacttgaacgaccaagtgactcttctcaagtatggtgtccatgaaatcatctatacgatgctggcctccctgatgaataaagatggagttctcatatcagagggccaaggattcatgaccagggagttcctcaaaagcctgcggaagccctttggtgactttatggagcccaagtttgagtttgctgtgaagttcaatgcactggaattagatgacagtgacttggccatatttatagctgtcattattctcagtggagaccnnnnnnnnnnnnnnnnnnnnnnnnnnnnnnaggacattcaagacaacctgctgcaggccctggagctccagctcaagctgaaccacccagagtcctcacagctgttcgccaaggtgctccagaagatgacagacctcaggcagatcgtcacagaacatgtgcagctattgcatgtgatcaagaagacggagacggacatgagccttcaccccctgctccaggagatctacaaggatctatattagcataaaaaaaccctcccccccaccccccggctgacgtgctccctctttcaattgcactattactctggaggggaaaatctgacaattaagaaatttactgtgaaaaagcattttaaaaacaaaaggttttagaacatgatctattttatgcatattgtttataaagatacatttacaatttacttttaatattaaaaattaccacattnnnnnnnnnnnnnnnnnnnnnnn

SEQ ID NO: 3403 - DNA, 274 bp, Mesocricetus auratus
  misc_feature (3)..(3): n is a, c, g, or t
  misc_feature (17)..(18): n is a, c, g, or t
  misc_feature (73)..(73): n is a, c, g, or t
  misc_feature (106)..(106): n is a, c, g, or t
  misc_feature (127)..(127): n is a, c, g, or t
  misc_feature (142)..(142): n is a, c, g, or t
  misc_feature (148)..(149): n is a, c, g, or t
  misc_feature (210)..(210): n is a, c, g, or t
  misc_feature (216)..(216): n is a, c, g, or t
  misc_feature (257)..(257): n is a, c, g, or t
  misc_feature (259)..(259): n is a, c, g, or t
  misc_feature (265)..(266): n is a, c, g, or t
ctnctcccaggtccccnncctgaggtctagaggaagggcctccgctgtacacataacacatggcctggctaancccattggttgcataaaactgtctgtgttagtncaggcacgggtgtcctaggtncttcacaaccctgtncactgnncagcagggtacaggctggcaggaatattcagttagctctctttataatttgaattctcttncttttngagtactttctgttaatctctccccaacaattactgacctncnttctanngatcactt

SEQ ID NO: 3404 - DNA, 3257 bp, Cricetulus griseus
  misc_feature (1066)..(1086): n is a, c, g, or t
  misc_feature (2121)..(2140): n is a, c, g, or t
tggcggaggccgacggacgggaccggccatgtcggtggtgggactagacgtgggctcgcagagctgctacatcgcggtggcgcgggccgggggcatcgagaccatcgccaacgagttcagcgaccgctgcaccccatcagtcatatcatttggaccaaaaaacagaacaattggagttgcagccaaaaatcagcaaatcactcatgcaaacaacacagtgtctagctttaagaggttccatggcagagcattcagtgaccccttcattcaaaaggaaaaggaaagcctgagctatgatttggtccccatgaagaatggtggcgttgggataaaggtcatgtacatggatgaagagcatctctttagcgtggagcagataacagccatgttgctgactaagttaaaggaaactgcagaaaacaacctcaagaagccagtaacagattgtgtcatttcagtcccctccttcttcactgatgccgagaggaggtctgtcctggatgctgcacagatcgtgggcttgaactgtttgcggctcatgaatgacatgacagctgtggctttgaattacggaatttataagcaggacctcccaaatgcagatgagaagcctcagggtagtggtgtttgtggacatgggccatcctctttccaagtgtctgcctgtgcttttaacaaaggaaaactcaaggttctgggcacagcatttgatcccttcttaggaggaaagaactttgatgagaagctggtggagcatttttgtgctgagtttaagaccaagtacaagttagatgcaaaatccaaaatccgagcactccttcgcctccatcaggagtgtgagaagttgaaaaagctcatgagctctaacagcacagacctgccactcaacatcgaatgcttcatgaatgacaaagatgtctctgcaaagatgaacaggtcacagtttgaagaactgtgtgctgaactcctgcagaaaatcgaggtccccctccattcattgatggaacaaactcacctcaagaccgaggatgtgagtgccattgagattgttggaggtgctacaagnnnnnnnnnnnnnnnnnnnnnaattgccaaattctttggaaaagatgtcagcaccacactcaatgcggatgaagccgtggctagaggatgtgcattgcagtgtgcaattctgtctccggcatttaaagttagagagttctctgtcaccgatgcagttcctttcccaatttctctggtctggaaccacgactcagaagaaaccgaaggtgttcatgaggtgttcagtcggaaccatgctgcacctttctccaaagttctcaccttcttgagaagggggccttttgagctggaagcgttctattcggaccctcaaggagttccttatccagaagcaaaaataggccgttttgtcgttcagaatgtttctgcacagaaagatggagaaaagtctaaagtgaaagtcaaggtgcgtgtgaacacacatggcattttcaccatctccacggcatccatggtggaaaaagtcccaacagaggaagacgacgggtcttctgtcgaggcagacatggagtgtccaaatcagaagccagcagaaagctcagatgtagataaaaatagccagcaagacaacagtgaagctggaacccagccccaggtacaaaccgatggtcaacaaacctcacagtctcccccttcacctgaacttccctcagaagaaaacaaaatcccagatgctgacaaagcaaatgaaaagaaagttgatcagcctccagaagccaaaaaacctaaaataaaagtggtaaacgttgaactgcctgtagaagccaatttggtctggcagttagggagagaccttcttaacatgtacattgagactgagggaaaaatgataatgcaggacaaactggagaaggagagaaacgacgctaaaaacgcagtggaagagtgtgtatatgagttcagggacaagctgtgtggaccatatgagaaattcatatgccaacaggaacatgaaaagttcctgaggcttcttacagagacagaagactggctgtatgaggaaggagaggaccaggctaagcaagcatatatcgacaagttggaagagttgatgannnnnnnnnnnnnnnnnnnngttcgatttcaagaagccgaggaacggccgaaagtattggaggagctggggcagcggctgcagcactatgccaagattgcagcagacttcagaagcaaggatgagaaatacaaccacattgatgaatcagaaatgaagaaggttgagaagtctgttaatgaggtgatggagtggatgaataatgtcatgaacgctcaggctaaaaggagtcttgaccaggaccctgttgtgcgcactcatgaaatacgagcgaaggtcaaggaattgaacaatgtttgcgaaccagttgtaaatcaacccaaaccaaaaattgagtcacctaaactggagagaactccaaatggtccaaatcttgacaagaaagaagatttagaaggcaaagataattttggtgctgaagctccacatcagaacggtgaatgccaccctaacgaaaagggctctgtcaatatggacctggactaggcgctgctggcttcctcctccagttcatgaaatgtgtttgccatagtatgtgattctgtacaacagactttgtcgtctatttatattttcttttcttttttttaaaagactgtctataaattttgtgtattatatgggaaaaaaggaaaagcctgagtctgtagtctttgaccctaaggagaatagccttggtgacagagtcgtgtggctgtgtgacccacactgagtactctacagtattgccacttggactgctgaggagtttgagtttgtcttttgaggagacaactcatcttgcttgttcaaatgctctgtgatgagacttttggagcagttgttctcctgcaaggctgtttcttttgcattttgctctccatttccgcatgtgtgtggctgtgggtgtttataatgagactaagtctgatttgcataagggctttcaaaaattaagtctgtcccgtagattttgctttcattattacaaattcaacgagtacaacacagctaatgaattgtagcagcatgcaaagcaaggctgtaactatcaccatacagtgcactgtcccgtgagtgtgacacgggcaaatatatgaatcatgtgaccattgtgactgccccatgagctttaaaataaagttcacccagtggtgtc

SEQ ID NO: 3405 - DNA, 440 bp, Mesocricetus auratus
gctcatcctttgctaagtctgaaaacaaactgagcaccatgaagctgtccctgtgtcttctgttggtcatcctggctgttcattgctatgaagctaatgctgcaaacgtctgtccagcagttctttctgtaagcaaatctttcctatttgacaaggtggagaaatttgaggcctatcttcagacatttaacgcacctccagaggctgttaaagcaaaagtggaagtgaagaaatgtatagacagcactctgaactatttagagaaaatggaaatgggaaaaatactggcagaagtcgttgggtattgtaaaggaacagaaaactgaaacatggctcttcctggtctccattgcttctcacagataaactgactttccttgcccaatgtgaaggtttcaacgtcttgcactaataaattactctccttgcatgttaaaaaa

SEQ ID NO: 3406 - DNA, 4454 bp, Cricetulus griseus
  misc_feature (1061)..(1080): n is a, c, g, or t
  misc_feature (2407)..(2434): n is a, c, g, or t
  misc_feature (3553)..(3569): n is a, c, g, or t
  misc_feature (3804)..(3845): n is a, c, g, or t
aaaaactgcagccacatacagccctgggaaactgattgtctgtcgtgcttgccagaaagacaatgtgaatatgatccaaagggtcccaaagtttcagatggaaaagaagaagtcttagtctcagcatgtcatcctgcaggacagcacacagcagcagcacagcccagcagcattagctttgaattacaggaagaccctgtcaatggccacaatagtacaagtcctaaagaaactcctagcttgaaggtgcttctgtcaaagccagttgtgctttctagaggaaaagtgtcatgtaaaatgccagagaaactgcagtgtgagagttataaagataatactgaattaagcaaaagcattcccttgggaggaaataaaatacacatcctaagtgaaaattctaaacctcctgagcttctgccacctggaaaatatgtaacagaagcatcccccacagtgaagtctcagttcaatcagaatacaaatctagcagtcaaaaaaaatgaccaagaagaaacgccttttatttcagaagtaacagtcaatgtgagttctggagaacttttcccagacaatgagaataatttcgcctttcaagtaactcatgaaaataataagactgccttaggaagtactgtggaactgcaggaagaagacctccgccatgctaaagggcctaatctcaacaactctcccacagcagtagatggagacataggtgatgagcaagcagctcatgcactgattatggaagactccgattcctcagctttagtccatgagtgtgcaaagaagagcagaaatactatagagcagcatctgaaaggaaccacagacaaagatttcaattcttccttggatgtgaaatcagatgggaacaatgactatacagacaaatggccaggatttttggatccagtttttaagcataaatttggaggtagcttcagaacagcttccaataaagaaataaaactttcagaacataatgttaagaaaagcaaaatgttcttcaaagatattgaagaggagtatcctactagtttaacctgtattgacatagnnnnnnnnnnnnnnnnnnnnaaccaggagatactaagtggaccttatacatttgatttgcagtcagtcactaccatgtctgcccatccacagagtcaggcatctgtttcttgtgaagatactcacacatcacttcaggtgttaccttcaaagcaagattttcattcgaatcacaatttaacacccagccaaaaggcagaaattacagaactttctactatcttggaagaatcaggaagtcagtttgaattcacacagttcaaaaagccaagccatgtagcacagaataatatacctgaagtgcctggaaaacagacggttgccataaatactacttctgaggggtggaaaaggattggtcttcatctcacagtggatcctgcctctgtagctcagacagatgacagcaagaaatttgaaggttctgctggatttagacaaagctttccttgcctgttgaaaagcagttgtaacaaaaatacatctagttttttagcaaatgtaaatgaaatggagtttcgaggatttcgttctgctcttggcacaaagcttagtgtgtctagtgaggctctgcaaaaagctgtgaaactcttcagtgacattgaaagtggtagtgaggagacttccacaaaagtcgacccaagagctttgtcttcaggtgctcgtcatgattctggtgcttctgtgtttaagataaggaaacaaaacagtggtaaaagttttgatgagaaaactagtaagtgccaagtaacattacagaataataccgaagtgactactggtatttttgttgacagaaatcctgaaaattatgcaagaaatacaaaatgtgaagataacaactctactggttttcaaagaagtccttataaattaaaaaactcggaggatagtgaatcaagtacaagcggcacagtttctgttcatcaagatgatggtgacttaccatgtgctgctgatcactgcagcaagtaccctgagtcgtgttcccaatatgtaagggaggaaaacacacaaattaaggaatgtgtatcagatttaacatgtttggaagtcatgaaagctgaggaaacatgctatattcaaccttcagataaagaacaattaccttcaggtaagatggaacaaaatagaaaagattttaatatatcctttcagactgcaagtgggaaaaatgtcagagtctctgaggagtcattaagtaaaagtatgaatattttaaatcaagtaacagatgaatcgatcatctcttcagattctttgaattctaaatttcattgtggcacaaataacaacaagatgggtatttcacatcacaaggaaactaccagtactaaaaaggtatttnnnnnnnnnnnnnnnnnnnnnnnnnnnngtcaattaccaactctccagcagcatcctagatgtgaaatagaaagtatcaaagaacctgctctgttgggttttcataccgctagtggaaaaaaagtcaaaattatgcagaaatctttagacaaagtgaaaaacctttttgatgagacacagtatgttagtcatcaagggtcaaaacccttgaaggacagagagaactgcaaagaaggacttgcattagatgtgagacaattgaaatacctgcctccaagtgttgaagaaatgcagaagagctttctctctaaggagtctgaagtgctatctaagcaaagtgatcgtttgtataggtcgactgaaaatctcagaacatcaaatggtacctcttctaaagctaatgtacatggaaacatagaaagtgaaatagaaaaaagtcctacaacttgctgcattagtcatttatcttattcagtcactgaagattctgctttgacatgtgacacaggacacggtagaaaaacttgtgtcagtgagtcttctctatccaaagacagaaaatggcttagagacgggactggtgataagcttcaaaaaagagatgctgccgaaattgaatgtgtaaaagaacatactgagggttatgctggagatgcttcatgtgagcatagtttagacagtatcagaaatgaagttgatataaattgtgtctctgaaaatcaaacttcagccttctttagtgaccctagcatgtgtcatagctgtccatcccattttggttgtcattgtgataacaagcataatgactcaggatatttctcaaaaaataaaatttattctgatactcagccagacacgaagaatgaagacactgccaatttttccagtgtatatgctacaaaagaagtaaatatatacccgccaactgtaaatgaagatatttgtgttcagaaacttgagactaactcttcaccacatacaaataaaaatgtagccattgacttggctatagcagattcaaggaattgtaaggtatgcccatccaagttcattacagatcactcacaagaaactgtgaaaacagtaaaagcaatatttacacataacagtgataaaacaattaagcaaaacacaaagagtaaaccannnnnnnnnnnnnnnnnctgtcagaaagcattggataattcagaggattttatatgtctagctcttagagatgactatatgaactcacataagattctgtttataacccacgatgaacaaatattacagcataacctaagtgtgtctggactggagaaagctcaaataccacctgttcacttggaaacttgggataagtgtaaatctacaagggaacttgcacaggcagcctgttcttcacacatgccgggnnnnnnnnnnnnnnnnnnnnnnnnnnnnnnnnnnnnnnnnnncgcttcattagaaaaggcaaggcaagtgttttctgagatggatggtggtgctaaacagttactttccacattgtctctggaaagtcatgaacaatcagaccattctgggagaagagaaaactctgtgacacataaccctgaggatgtattgtcactcccaaaaacctttgcaagcaatgccaattcatctgtattctctggatttagtacagcaggtggtaaacgggtcacagtttcagaaagtgccttacacaaagttaagggaatgttagaggaatttgatttgatcggaactgaacatactctccagtgtccacctacatctgaaggtgtatcaaaaatacttcctcaatattgtgttgaaaagagaaccccagaataccctataaactctaaattgcagaaaacctatgatgataaattcagtttaccaaacaactataaagaaagtgcttctttggggaatactcattctcttgaagcttctccccaactctctcagtttaagcaagacacacggttggtattaggaaccaaagtatcccttctggaaaaagaacaaaccttccctcaaaatataaaaacagaaagtggtgtaatggaaactag

SEQ ID NO: 3407 - DNA, 211 bp, Mesocricetus auratus
agcacatcttcccagcctgagttccagagcctgcagatcgcctgggaactgcacaaagctcccaatcccggcgaagcaagcatcccagattccagatcttctctcccaccaaagagaccaggaaactacaggaaccagggagaccaggggattagctgttcccaggatcaggtaccaatcattgacccagtaattaaggggtttccaatgg

SEQ ID NO: 3408 - DNA, 159 bp, Mesocricetus auratus
agtgtgtgtatgacgtgaattaaaggtatttggtagacataaaaatgaaagttgactggacctgtgcctgcagcagcacaatgcaggcatgtagctagtattcggaaccgctaagaagtctgtgccccatgatctctgggttctcgagttccatgctgg

SEQ ID NO: 3409 - DNA, 239 bp, Mesocricetus auratus
  misc_feature (120)..(122): n is a, c, g, or t
ggttctatatgtatatattttggagttcagccctctgtcagacgtggggttgacaaggaaattttctcattctgtagtagccctttcatattgttgacagcattgtttgctaatggaaannngcccatttcttagttggtgcttttgctgtctgtgtccgaggtgttctactcagtaagttgattactgtgccatgacattcaaggctaattatcaccagcgctgctagcaggttcata

SEQ ID NO: 3410 - DNA, 99 bp, Mesocricetus auratus
  misc_feature (47)..(47): n is a, c, g, or t
  misc_feature (52)..(54): n is a, c, g, or t
aatctaacacgttactattttggggttcagtgtgggcctctatttanaaaannnaaaatgatgtatatgtggcgcaatcttacacagcaatacacactt

SEQ ID NO: 3411 - DNA, 189 bp, Mesocricetus auratus
ttttgagaaactctcctttgtaaaaaccccttgttcagacaacagcaaacatcttataatgtgcttaaacagttgaaccttttgcatatacaaagttttaatcaccttaggtaaagctcaaagccaggtatttaaactatgtgtgctgtccacatttaatttataacatatgcaaagctcataaatgcc

SEQ ID NO: 3412 - DNA, 148 bp, Mesocricetus auratus
  misc_feature (72)..(73): n is a, c, g, or t
  misc_feature (85)..(88): n is a, c, g, or t
  misc_feature (98)..(100): n is a, c, g, or t
  misc_feature (103)..(103): n is a, c, g, or t
  misc_feature (108)..(109): n is a, c, g, or t
  misc_feature (130)..(131): n is a, c, g, or t
gatctgtgattagtctgggggtgtcgggagtgatggggagaactcttgggggaaggtgcatgactaccgcannctcatcattccnnnncttctctccnnnccnccacnngcttagagccgtcggattttnnttgagatcagaccaggg

SEQ ID NO: 3413 - DNA, 98 bp, Mesocricetus auratus
ggtgttaattgccagtattacactgaagtatgtcccttgtttccctagtctctctaggacttcagcatgaagtgctgttgtttcttgtcaatggtctt

SEQ ID NO: 3414 - DNA, 148 bp, Mesocricetus auratus
  misc_feature (5)..(7): n is a, c, g, or t
  misc_feature (35)..(35): n is a, c, g, or t
  misc_feature (40)..(40): n is a, c, g, or t
  misc_feature (71)..(71): n is a, c, g, or t
  misc_feature (89)..(89): n is a, c, g, or t
tcttnnnggccataatgtactcactataggcgaantcganctcggtaccaagaccattgacaagaaacaanagcacttcatgctgaagncctagagagactagggaaacaagggacatacttcagtgtaatactggcaattaactccg

SEQ ID NO: 3415 - DNA, 100 bp, Mesocricetus auratus
tgacatcactatagtgcaatatgacatcacaattatacactgtgttatctatatactgcagtgtgacaattattgactgtaatatagctatagtgctcta

SEQ ID NO: 3416 - DNA, 179 bp, Mesocricetus auratus
atccaagatccaagagcactccacctcagcctccatccctaaatctgagtgtactaaaactctttcacacaaatttttctgcattctttgcatcagaagactgctgcaagaacattgcttataaattggggacaaatttgaataccattgaggaagttctgagattgaggaaacgtgaa

SEQ ID NO: 3417 - DNA, 230 bp, Mesocricetus auratus
cctgatgtagagaatgctgtattgagatgctctagatagttgcaactgggcatcacaagagatgtcacatattactttgtatatgaggacttcaaggttataccagctattcctttctcattggttggtaggatgattatagtcagagtcaccaccagcaattgctaacgggcggatattaggggtaataatgtttaccgttaagactttaatggtatccatggtcattt

SEQ ID NO: 3418 - DNA, 123 bp, Mesocricetus auratus
  misc_feature (115)..(117): n is a, c, g, or t
gccagtgttgtttctcaattatgcttcactttatttttgagtcattgtctcattgaatatggaggttcctgtttcagatagatgagctggccaagaagccttaacaaccctcctnnntccctt

SEQ ID NO: 3419 - DNA, 143 bp, Mesocricetus auratus
gagaggagggagggaaggctgtggtcggtgatgccccaaatgaggttgtaacggtaaacgtcacatttactgaaagtaagtatttattgtagaaattactcacaagataccaaacaagtaacccagatgagcccagtagtttt

SEQ ID NO: 3420 - DNA, 638 bp, Mesocricetus auratus
cagcagctctcagccgccaccccgcacggcatcaacgacatcctgagtcggccctccatgccggtggcctcgggggccgccctcccttccgcctcgccctcggggtcgtcttcctcctcctcgtcgtccgcctccgccacctcggcctctgcggccgccgaaaagcacaagtcgagcagcggcggcctcctgctgcacgcgtccgaggccgagggctcgtcctgagcgccgcccgcccgcccgcccgcccgctgctgcgggatcccgggccgccccgaccgcgcccctcagccggtcacccccgggcccagcaccgcggctgctccccgggcctttactattttctaagatgtacatatctatttttttaacccagaaatcgtggcggggcctggggggataggacggcgcgttgacgagaaggaagggagcccgccgagtgcgccgcgttaaatgacgaacccgcatccccgcggctcccctggacccttcccacccgcggtgtcagtcaatccccacccccatccaggctcggtcccttgctctgtggtccctgagctccggggttcgtgtttgtgaagagtcgacagccagcgcctggtgggaatctccgagccacacagggcatctgccaccta

SEQ ID NO: 3421 - DNA, 2832 bp, Cricetulus griseus
  misc_feature (54)..(82): n is a, c, g, or t
  misc_feature (88)..(138): n is a, c, g, or t
  misc_feature (141)..(153): n is a, c, g, or t
  misc_feature (183)..(222): n is a, c, g, or t
  misc_feature (244)..(314): n is a, c, g, or t
  misc_feature (322)..(366): n is a, c, g, or t
  misc_feature (369)..(395): n is a, c, g, or t
  misc_feature (411)..(450): n is a, c, g, or t
  misc_feature (482)..(595): n is a, c, g, or t
  misc_feature (598)..(624): n is a, c, g, or t
  misc_feature (643)..(679): n is a, c, g, or t
  misc_feature (686)..(699): n is a, c, g, or t
  misc_feature (701)..(823): n is a, c, g, or t
  misc_feature (826)..(852): n is a, c, g, or t
  misc_feature (868)..(908): n is a, c, g, or t
  misc_feature (915)..(928): n is a, c, g, or t
  misc_feature (930)..(964): n is a, c, g, or t
  misc_feature (969)..(1045): n is a, c, g, or t
  misc_feature (1057)..(1083): n is a, c, g, or t
  misc_feature (1099)..(1138): n is a, c, g, or t
  misc_feature (1145)..(1158): n is a, c, g, or t
  misc_feature (1160)..(1197): n is a, c, g, or t
  misc_feature (1206)..(1282): n is a, c, g, or t
  misc_feature (1286)..(1312): n is a, c, g, or t
  misc_feature (1328)..(1367): n is a, c, g, or t
  misc_feature (1375)..(1388): n is a, c, g, or t
  misc_feature (1390)..(1512): n is a, c, g, or t
  misc_feature (1515)..(1542): n is a, c, g, or t
  misc_feature (1558)..(1598): n is a, c, g, or t
  misc_feature (1620)..(1687): n is a, c, g, or t
  misc_feature (1690)..(1743): n is a, c, g, or t
  misc_feature (1746)..(1770): n is a, c, g, or t
  misc_feature (1788)..(1828): n is a, c, g, or t
  misc_feature (1852)..(1920): n is a, c, g, or t
  misc_feature (1932)..(1972): n is a, c, g, or t
  misc_feature (1975)..(2002): n is a, c, g, or t
  misc_feature (2018)..(2058): n is a, c, g, or t
  misc_feature (2065)..(2078): n is a, c, g, or t
  misc_feature (2080)..(2202): n is a, c, g, or t
  misc_feature (2205)..(2231): n is a, c, g, or t
  misc_feature (2254)..(2282): n is a, c, g, or t
  misc_feature (2293)..(2306): n is a, c, g, or t
  misc_feature (2308)..(2431): n is a, c, g, or t
  misc_feature (2434)..(2460): n is a, c, g, or t
  misc_feature (2476)..(2516): n is a, c, g, or t
  misc_feature (2544)..(2626): n is a, c, g, or t
ccacgaatatttgtcattcctgacctgttttttgtttgtgtgtgtgacagacannnnnnnnnnnnnnnnnnnnnnnnnnnnngcaaannnnnnnnnnnnnnnnnnnnnnnnnnnnnnnnnnnnnnnnnnnnnnnnnnnaannnnnnnnnnnnngagggcatcccccctgaccagcagaggctnnnnnnnnnnnnnnnnnnnnnnnnnnnnnnnnnnnnnnnntccgactacaacatccagaagnnnnnnnnnnnnnnnnnnnnnnnnnnnnnnnnnnnnnnnnnnnnnnnnnnnnnnnnnnnnnnnnnnnnnnnaaccatcnnnnnnnnnnnnnnnnnnnnnnnnnnnnnnnnnnnnnnnnnnnnnaannnnnnnnnnnnnnnnnnnnnnnnnnntgaccagcagaggttnnnnnnnnnnnnnnnnnnnnnnnnnnnnnnnnnnnnnnnntccgactacaacatccagaaggagtccacccnnnnnnnnnnnnnnnnnnnnnnnnnnnnnnnnnnnnnnnnnnnnnnnnnnnnnnnnnnnnnnnnnnnnnnnnnnnnnnnnnnnnnnnnnnnnnnnnnnnnnnnnnnnnnnnnnnaannnnnnnnnnnnnnnnnnnnnnnnnnntgaccagcagaggttgatnnnnnnnnnnnnnnnnnnnnnnnnnnnnnnnnnnnnntccgacnnnnnnnnnnnnnngnnnnnnnnnnnnnnnnnnnnnnnnnnnnnnnnnnnnnnnnnnnnnnnnnnnnnnnnnnnnnnnnnnnnnnnnnnnnnnnnnnnnnnnnnnnnnnnnnnnnnnnnnnnnnnnnnnnnnnnnnnnaannnnnnnnnnnnnnnnnnnnnnnnnnntgaccagcagaggttnnnnnnnnnnnnnnnnnnnnnnnnnnnnnnnnnnnnnnnnntccgacnnnnnnnnnnnnnngnnnnnnnnnnnnnnnnnnnnnnnnnnnnnnnnnnngtggnnnnnnnnnnnnnnnnnnnnnnnnnnnnnnnnnnnnnnnnnnnnnnnnnnnnnnnnnnnnnnnnnnnnnnnnnnnnngtcaaggcaaannnnnnnnnnnnnnnnnnnnnnnnnnntgaccagcagaggttnnnnnnnnnnnnnnnnnnnnnnnnnnnnnnnnnnnnnnnntccgacnnnnnnnnnnnnnngnnnnnnnnnnnnnnnnnnnnnnnnnnnnnnnnnnnnnngatgcagannnnnnnnnnnnnnnnnnnnnnnnnnnnnnnnnnnnnnnnnnnnnnnnnnnnnnnnnnnnnnnnnnnnnnnnnnnnnaagnnnnnnnnnnnnnnnnnnnnnnnnnnntgaccagcagaggttnnnnnnnnnnnnnnnnnnnnnnnnnnnnnnnnnnnnnnnngtccgacnnnnnnnnnnnnnngnnnnnnnnnnnnnnnnnnnnnnnnnnnnnnnnnnnnnnnnnnnnnnnnnnnnnnnnnnnnnnnnnnnnnnnnnnnnnnnnnnnnnnnnnnnnnnnnnnnnnnnnnnnnnnnnnnnnnnnnnnnaannnnnnnnnnnnnnnnnnnnnnnnnnnntgaccagcagaggttnnnnnnnnnnnnnnnnnnnnnnnnnnnnnnnnnnnnnnnnntccgactacaacatccagaagnnnnnnnnnnnnnnnnnnnnnnnnnnnnnnnnnnnnnnnnnnnnnnnnnnnnnnnnnnnnnnnnnnnncannnnnnnnnnnnnnnnnnnnnnnnnnnnnnnnnnnnnnnnnnnnnnnnnnnnnnaannnnnnnnnnnnnnnnnnnnnnnnncctgaccagcagaggttnnnnnnnnnnnnnnnnnnnnnnnnnnnnnnnnnnnnnnnnntccgactacaacatccagaaggannnnnnnnnnnnnnnnnnnnnnnnnnnnnnnnnnnnnnnnnnnnnnnnnnnnnnnnnnnnnnnnnnnnnaaccatcacccnnnnnnnnnnnnnnnnnnnnnnnnnnnnnnnnnnnnnnnnnaannnnnnnnnnnnnnnnnnnnnnnnnnnntgaccagcagaggttnnnnnnnnnnnnnnnnnnnnnnnnnnnnnnnnnnnnnnnnntccgacnnnnnnnnnnnnnngnnnnnnnnnnnnnnnnnnnnnnnnnnnnnnnnnnnnnnnnnnnnnnnnnnnnnnnnnnnnnnnnnnnnnnnnnnnnnnnnnnnnnnnnnnnnnnnnnnnnnnnnnnnnnnnnnnnnnnnnnnnaannnnnnnnnnnnnnnnnnnnnnnnnnntgaccagcagaggttgatctttnnnnnnnnnnnnnnnnnnnnnnnnnnnnntctgtctgacnnnnnnnnnnnnnngnnnnnnnnnnnnnnnnnnnnnnnnnnnnnnnnnnnnnnnnnnnnnnnnnnnnnnnnnnnnnnnnnnnnnnnnnnnnnnnnnnnnnnnnnnnnnnnnnnnnnnnnnnnnnnnnnnnnnnnnnnnnaannnnnnnnnnnnnnnnnnnnnnnnnnntgaccagcagaggttnnnnnnnnnnnnnnnnnnnnnnnnnnnnnnnnnnnnnnnnntccgactacaacatccagaaggagtctnnnnnnnnnnnnnnnnnnnnnnnnnnnnnnnnnnnnnnnnnnnnnnnnnnnnnnnnnnnnnnnnnnnnnnnnnnnnnnnnnnntgagcccagtaacaccatcaagaaaagcaaacaggaagatggacgcacctttctcactacactgtctagaaagagcacaccttgtgcttgttcttgggcttgaggggaggtgttttaatttaccccatcttttaagttgttaacaagtttcattgcactttgaataaagttcttgcattcccaaaggtgttggatctcgttttagc

SEQ ID NO: 3422 - DNA, 111 bp, Mesocricetus auratus
acctgtctcttggacattctcgacacagcaggtcaagaggagtacagtgcaatgagggaccagtacatgaggactggggagggctttctttgtgtatttgccataaataat

SEQ ID NO: 3423 - DNA, 521 bp, Cricetulus sp.
  misc_feature (504)..(521): n is a, c, g, or t
aagcttttaccgccaagaggatcccagagaagaggctggagagctacaagagaatcaccagcagcaagtgtcccaaagaagctgtgattttcatcaccaagctcaagagagagatctgtgctgaccccaagcaggactgggtccagacatacacaaaaaaactggaccagagccaagctaaatcagaagctgcaactgtgtataaaacagcacctttgaatgctaacttgacccatgagtctgcagttaatgcatccactactgcctttcccaccacagacttgagaayttctgtaagagtgaccagtatgacagtgaactagtgtgacctggaatgtgatgccttaagtaatattaactttatttaacttattaatgtttcaatatccccctccctgtatacttggatttcttagatgcatgacgtggtttcattgttttccctctgtgaaccctggttctccaccctaaatgttatgagagatgacttttgtaaagatgagnnnnnnnnnnnnnnnnnn

SEQ ID NO: 3424 - DNA, 1254 bp, Cricetulus griseus
  misc_feature (754)..(981): n is a, c, g, or t
atgcgctctctccttctgggctccttctgcctcttggcagtggccctggcagccgaggtgaagaaacctgtagaggcagcagcccctggtactgcagagaagctgagttccaaggcgaccaccctggcagagcgcagcacaggcctggcctttagcctgtatcaggctatggccaaagaccaagcggtggagaacatcctcctgtcacccttggtggtggcctcatccctgggtcttgtgtcattgggaggtaaagccaccacagcatcgcaggcaaaggctgtgctaagcgccgagaagctgcgggatgaggaagtgcacaaggggctgggtgagctcctgcgctccctcagtaactctactgctcgcaatgtgacctggaagctgggcagccgcctgtatgggcccagctccgtgaacttcgtcgaagacttcgtgcatagcagtaaacagcactacaactgcgaacactccaaaatcaacttccgagacaagcgcagtgccctgcagtccatcaacgagtgggcctctcagaccactgacggcaagctaccagaggtcaccaaggatgtggagcgcacagacggggcactgcttgtaaacgccatgttctttaagccacactgggatgagaaatttcatcacaagatggtggataaccgtggcttcatggtgactcgctcctatactgtgggtgttacaatgatgcaccggacaggtctctacaactactatgatgatgagaaggagaagnnnnnnnnnnnnnnnnnnnnnnnnnnnnnnnnnnnnnnnnnnnnnnnnnnnnnnnnnnnnnnnnnnnnnnnnnnnnnnnnnnnnnnnnnnnnnnnnnnnnnnnnnnnnnnnnnnnnnnnnnnnnnnnnnnnnnnnnnnnnnnnnnnnnnnnnnnnnnnnnnnnnnnnnnnnnnnnnnnnnnnnnnnnnnnnnnnnnnnnnnnnnnnnnnnnnnnnnnnnnnnnnnnnngccattgacaagaacaaggcagatttatcacgcatgtctggcaagaaggacctgtacctagccagtgtgttccatgccactgcctttgagtgggacacggatggcaacccctttgatcaagacatctacgggcgtgaggagctgcgaagccccaagctgttctatgctgaccaccccttcatcttcctggtgcgagataatcagagcggctcgttgctgttcattgggcgcctggtccggcccaagggagacaagatgcgagatgagttgtag

SEQ ID NO: 3425 - DNA, 606 bp, Cricetulus griseus
  misc_feature (407)..(425): n is a, c, g, or t
tttagtaacggtgtgtatcaagcatatagcactcacagtataaccttttttcaagctaaatacaaccattttctgccttggactttataattaaatttgcacaggcattgatattttgtagattccttttattagccacttagcctaactctgctggaggtgttgattctaattgtctctcctgttttcctttgtccagggcttttttcttactgtctccccagagtcagtattgaaagttgctcgctatgctgctgagaacaacaggatcttcactttgaacttgtctgcaccgtttattagccagttcttcaaggaatccttgatggaagtcatgccttatgttgacatcctctttggaaatgagacggtgagttgcttttaaaaaaataaaacaaaaaacagcnnnnnnnnnnnnnnnnnnnaactaaagccaggtatggtagtgtgtgcctttaatcccaacattcaggaagcaaaggcagggattgtctctaaaaaacaaaacaattaagtaatcgtctgtttctgggctttgcgtatgtttttctctaccactgtattttctgtatttcttacagaataacttcttgataaaaaaataaa

SEQ ID NO: 3426 - DNA, 2459 bp, Cricetulus griseus
  misc_feature (2440)..(2459): n is a, c, g, or t
gcacgaggcgccttggagccggatccggccccggaaacccgacctgcagacgcggtacctctactgcgtagaggccgtagctggcggaaggagagaggcggccgtcctgtcaacaggcgggggaagccgtgctttcgcggctgcccggtgcgacactttctccggacccagcatgtaggtgccgggcgactgccatgaactccggagccatgaggatccacagtaaaggacatttccagggtggaatccaagtcaaaaatgaaaaaaacagaccatctctgaaatctctgaaaactgataacaggccagaaaaatccaaatgtaagccactttgggaaaaagtattttaccttgacttaccttctgtcaccatatctgaaaaacttcaaaaggacattaaggatctgggagggcgagttgaagaatttctcagcaaagatatcagttatcttgtttcaaataaaaaggaagcaaagtatgcacaaacactgggtcaagtttctcctgtaccaagtccagagtctgcatatactgcagaaaccacctcacctcatcccagccatgatggaagttcctttaagtctccagacagagtatgtttgagccgagggaagttattagctgaaaaagctgtcaaggatcatgattttattcctgctaatagtatattatcaaatgccttaacatggggagtaaagattcttcatattgatgacattagatactacattgaacagaagaagaaagagttatgttcactcaagaaatcaagtacttctgtgagggattcgggaaaaaaagctggcactacaatacaaaaggcgagaacagggagactcaaaaagccttttttaaaggttgaagatgtgaaccggtcttacaggccattctaccttcagctgaccagtgtgccttctataaactatgctacgcacaagccttgcagcccatttgacatagagaagccatccagcgtccaaaagcaagctcagcctaaacccagacctaatacggatggtgataaatgtggtggaaccccagttcaactccaattgaaggaaaagagaaaaaaaggatattgtgaatgttgcttacagaaatacgaagatcttgaaactcaccttttgagtgagaaacacaaaaacttcgcacagagtaaccagtatcaagttgttgatgatattgtatctaagttagtttttgattttgtggaatatgagagagacacacctaaaaagaaaagaataaaatacagcgttggctccttttcttctgtttctgcaaatgtcctgaaaaacactgaaccaaaggagaagctacagttggagcccattttccagaaggacatggtagaaagtaatggacaactgcctgaggagatttttcagtgtgaagatatccagtgtgaagatatccagaaacctgaacaaaggcttgtgttggcttcagaacccatgtcctactcttcaacgggattgaaaggacgtgatgagaaagcagccagcatgttaaatgccagtgaacctgacataaaacagaagtttacacagctacctccatgtaaaaatgaacaggaaggaattcttgatgtttctgaacataaattaattattaatagaaatgatttagaacagagggttggtgactctgtaggtgtgccacggtcatgtgtacaagtttctcatctcagtccagaaaatagtctaccccaaccaaaattaacagcagatactacacatttttcagcaaaagatttacaagaaaaggaccttcattttgtgtttggtcatgattctgatctggtgacattaaatacatcaaaagaacagctaacagtgaaggccggaacgccatcctgtggtcctcagcagcccaatgagtgtgacacggagaatacagataacttgccttgtggtaagatccagcggaaagtgagactgttattagggcagaagaaaaaaaatgtggacccaagtgctgaattggataaaaaaagaactgagtttcttcctatgtgtgaagacagaacttgtgggtcaccagtacagtctctactggacctttttcaaacaagcggggagaaatcagattttttggggtttaccagctacactgaaaacagtgggctatgtgatgttttagatgtttgggaggatgaaaattcaagtagtctgctctcaacatttttctcttccccttcagcttctacattcattggattttagtatttaatgtgtttttcagaagtgacagttttattcttggaatttttataaatacatatataattcttaggagtctgctttttggttttggtttgttctttgccagctttgttgctagaaccatatgtaaatactaagatgatgtttataattttttacagaattgagtagctgttacaaattatacaataaaatcttgtgatttattttacatnnnnnnnnnnnnnnnnnnnn

SEQ ID NO: 3427 - DNA, 391 bp, Cricetulus griseus
gatctttattgccataaagcagagtaactgtgtttgacttggaccttgtttactgtgaactctaatcgaggcaggcgatgcagcatcctcctaatggccatgtggacttgtagatgggtcacttaacccttgcttaagaatccagtttggcttagggtgtgaattgggaatactgttccatgggttgcaatgcagctctactcatgttaccaagcttgctctattgtcaatagcatgcaacatatgttttgtttgcccttctgcttctactttttccagggaagctgctaaagaatgtcgacgtcgaaagaaagaatatgtaaagtgtctggagagtcgagttgcagtgctggaagttcagaacaagaagcttatagaggaacttgaaacc

SEQ ID NO: 3428 - DNA, 2483 bp, Mesocricetus auratus
  misc_feature (197)..(206): n is a, c, g, or t
  misc_feature (1521)..(1541): n is a, c, g, or t
atgttggtctccgattacagatgctaggtgttcaaggagcgtgcaaagacaatcctggagaaaatgcacggcaacttgcccgaattgtgtgtggtactgtaatggctggggagttgtccttgatggcagcattggcagcaggacatcttgttagaagtcacatggttcataacaggtaagattaaagttttacaatnnnnnnnnnntttaaaaaatgcaccaggtgtagtggtgaacttaaatgcaaactgtgggcaggtagagaggcagatcctgtgtgctcactgaggggccagcccagcctacttggcaagtttcaggccttgtctcaaaataaaggataggtggtgcctgaggggtgacatctagtgttttcttttggcctgaacacatgcacacatacatacgcacatacacatgcacctccaacccccatttttcattgttgacattttctatattactaattagtctttttctgacatagatcgaagataaatttacaagatctgcaaggaacgtgcaccaagaagtcagcttgagcagcctgacagtattgaactgaaacacgggcattgggttctcaaggactaacatgaaatctgtgaattaaaaatctcaatgcagtgtcttgtggaagatgaatgaacgtgatcagtgagacgcctgcttggtttctggctctttcagagacgtctgaggtcctttgctcggagactcctcagatctggaaacagtgtggtccttcccatgctgtattctgaaaagatctcatatggatgttgtgctctgagcaccacagatgtgatctgcagctcgtttctgaaatgatggagttcatggtgatcagtgtgagactggcctctcccagcaggttaaaaatggagttttaaattatactgtagctgacagtacttctgattttatatttatttagtctgagttgtagaactttgcaatctaagtttattttttgtaacctaataattcatttggtgctggtctattgatttttgggggtaaacaatattattcttcagaaggggacctacttcttcatgggaagaattacttttattctcaaactacagaacaatgtgctaagcagtgctaaattgttctcatgaagaaaacagtcactgcatttatctctgtaggccttttttcagagaggccttgtctagatttttgccagctaggctactgcatgtcttagtgtcaggccttaggaaagtgccacgctctgcactaaagatatcagagctcttggtgttacttagacaagagtatgagcaagtcggacctctcagagtgtgggaacacagttttgaaagaaaaaccatttctctaagccaattttctttaaagacattttaacttatttagctgagttctagatttttcgggtaaactatcaaatctgtatatgttgtaataaagtgtcttatgctaggagtttattcaaagtgtttaagtaataaaaggactcaaatttacactgataaaatactctagcttggnnnnnnnnnnnnnnnnnnnnntagcgttgtccaggaaaccctgcttgcttgccaagcctaatgaagggaaagtcagctttcagagccaatgatggaggccacatgaatggccctggagctgtgtgccttgttctgtggccaggagcttggtgactgaatcatttacgggctcctttgatggacccataaaagctcttagcttcctcagggggtcagcagagttgttgaatcttaattttttttttaatgtaccagttttgtataaataataataaagagctccttattttgtattctatctaatgcttcgagttcagtcttgggaagctgacatctcatgtagaagatggactctgaaagacattccaagagtgcagcggcatcatgggagcctcttagtgattgtgtgtcagtattattgtggaagattgactttgcttttgtatgtgaagtttcagattgctcctcttgtgactttttagccagtaacattttatttacctgagcttgtcatggaagtggcagtgaaaagtattgagtattcatgctggtgactgtaaccaatgtcatcttgctaaaaactcatgttttgtacaattactaaattgtatacattttgttatagaatactttttccagttgagtaaattatgaaaggaagttaacattaacaggtgtaagcggtggcttttttaaaatgaaggattaaccctaagcccgagacccagaagctagcaaagtctggcagagtggtaaactgtcctgctggggccatccaatcatctctctccattacactttctaactttgcagcattggtgctggccagtgtattgtttcattgatcttccttacgcttagagggtttgattggttcagatctataatctcagccacattgtcttggtatcagctggagagagttaagaggaagggaaaataaagttcagatagccaaaacac

SEQ ID NO: 3429 - DNA, 77 bp, Mesocricetus auratus
tcaaactcctagtgcctgaaggaggagacagtgaccgagctggagactgcagttctctgtccttcacacaggtatga

SEQ ID NO: 3430 - DNA, 141 bp, Cricetulus griseus
tgctgactcttgcagcaccgagctcatgaggagagtccggcgcttccagatcgcccagaacaaatgcctggtcatcaagtatgccaaagacacgcgctatagcagcagcttctccacacatgaccggtcagtcccaccacc

SEQ ID NO: 3431 - DNA, 2027 bp, Cricetulus griseus
gctggcactggctgttttgacctcctgctcgacgctgaaaagtgcaaatatggcatggagatccccaccaatatccctggcctgggggctgctggacgtgagtcagagggctttggctgggtctgtggaggatgggtggggataggcatacgaaggagggtgtctttagtccctgagtgtacttcctcaagaattactctgggtttctttgcagctactggaatgttctttggctctcacccagtccgatgggcggaatatctcctgcaatgacaccctggaaccagtcagacccagcctatggtgcttggtccccaagtgttggtgagtagcctagtccaggaagagaactattggacttcaggggctgtgggggctggggaaagctatgttgttgagctacaactgattccacctgtcctccttctcagggagtggaatgaccccaggagcagctggcttctcgcccagtgctgcatctgatgccagtggctttagcccaggttactctcctgcatggtctccgacaccaggctctccaggctcccctggaccctcaagcccatatatcccctcaccgggtgagttgctgtgctccttccctcttcactccttccttctgtggcaggcttcccatttcttatctcccttttgtctttccctacaggtggtgctatgtctcccagctactcaccaacatcacctgcctatgagccacggtcccccgggggatatacaccccagagcccttcatactctcctacttcaccctcctactccccaacctcgccatcttattccccaaccagtcccaactatagccctacgtcacctagctactcgccgacctctccatcctactcgccaacctctccatcctactccccgacctctccatcctactccccgacctctcccagctactccccgacctctcccagctactccccgacatcacccagctactccccgacttctcccagctactccccgacatctcccagctactcacccacctctcccagctattcccccacctccccaagctactctcccacctcccccagttactcaccgacttcccccagctactctcctacatctccaagctactcgccaacttctccaagttattcacccaccagccctaactattctccaactagtcccaattacaccccaacatcccccagctacagcccaacatcacctagctactcgcctactagtccaaactacacaccaaccagtcccaactacagcccaacctcgccaagctattccccaacttcacccagctactccccaacctcgccaagctattcaccctccagcccacggtacacaccacaatctcccacctacacaccaagctctcccagctacagccccagctcaccaagctacagccccacctcacccaagtataccccaactagtccttcttacagtcccagctctccagagtataccccaacctctcccaaatactcacctacaagccctaaatattcacctacttctcccaagtattctcctaccagtcccacctactcacctaccacaccaaaatactcgccaacctctcctacatactcgccaacctctccagtctacaccccaacctcccccaagtactcacccaccagccccacctactcccccacctctcccaagtactcacccaccagccccacctactcccccacctcccccaagggctccacttactcccccacctcccctggttactcacctactagccccacctacagcctcaccagcccagccatcagccctgatgacagtgatgaggaaaactaagggtgagcagggcgcagcagcagcaggttagggtcagacagccttagtggcctgtgcagtcacttcccttgagctgtgaccctagcctgggccccttgtacataactccttgtgacagaaccctctggaggttctagatcccatttttgatgggcttttcgtcttgtcctcactcgtgctgtcttgggactcactgacagctg

SEQ ID NO: 3432 - DNA, 837 bp, Cricetulus sp.
agtagcgtgagtctcacacttcggttatatcatgttgaagatgaacgggtggcagcgacagagccaaaataaaagccgggacctgaggagcgagtgttccagaaggaagtgtatcttcatacatcaccatacctgaaagcagaacccagtccaactacagacatggcagctgagtccctgccattcaccttggagacggtgtccagctgggagctggaagcgtggtatgaggatctgcaggaggtgctgtcctcggatgaaaatgggggtccctatagctcatcccttggaaacgaagagggggagtcaaaaaccttcactaccctagaccctgcatccctagcttggctgactgaggagccggggccagcagaggtcacaagcagctcccagagcccccgctctccagattccagtcagagctgtatggctcaggaggaagaggaagatcaaggacgaaccaggaaacggaaacagagtggtcagtgcccagcccggggcactgggaagcagcgcatgaaggagaaagaacaggagaacgagaggaaagtggctcagctagctgaggagaacgagcggctcaagcaggaaatcgagcgcctgaccagagaggtagaggccactcgtccgggctctgatcgaccgcatgtaaatctgcaacaagtatgaacaattgggactatcattccccaacttgagtgacctcctgtctctcctggaccatcatgtcaatgccaaggatgctgggtagggagaacaaaggtctcagctagtgtgtatatatattgtacattctttattattttattgtctgtacccggtaaagtgactttgtat

SEQ ID NO: 3433 - DNA, 2703 bp, Cricetulus griseus
ctttcgagcttcttggatttgttttttacctgctgttgttcccgagcccatggagtcgcttcccgctcgattgtttcctggtctctccatcaagattcaacgcagtaatggcttaattcacagtgccaacataagcacagtgaacgtggagaaatcctgtgtttcagtggaatggatagaaggaggtaacacgaaaggcaaagagattgattttgatgatgtggctgcaataaacccagaacttctacagcttcttcccttacacccaaaggacaatctgccactgcaggaaaatgtaacagttccgaagcaaaaacgcagatcagtcaactccaaaattccagctccaaaagaaggtcttcgaagccgttccactcgcatgtccactgtcccagaggttcgaattgccactcaggagaatgaaatggaggtggagctgcctgtggctacaaactctcgaaagcagttttcggttgccactggcctccctaggccctcctgtcctgcaatgacagaattaccgttgtcgatggtcagcgaggaggcagaagagcaagtccatcccacccgaagcacatcttctgcaaaccctgctcggaggaaatcatgtattgtgaaggaaatggaaaaaatgaagaacaagcgggaagagaagagggcccagaactcggaaataagaataaagcgagctcaggaatatgacagcagctttccaaactgggaatttgcccggatgattaaagaattccgggttactatagaatgtcacccacttactctgactgatcctacggaagagcacaggatctgcgtgtgtgtgaggaagcgcccactgaataagcaagaactggccaagaaagaaatcgatgtgatttctgttcccagcaagtgtttgctctttgtgcatgaacccaaattgaaagtggacttgacaaagtatctggagaatcaggcattctgcttcgattttgcctttgatgaaacagcttcaaatgaagtcgtctacaggttcacagcaaggccactggtacagacgatttttgaagggggaaaagcaacctgctttgcctatgggcagacgggcagtgggaagactcacacaatgggtggagacctgtctggtaaatctcagaatacatctaaagggatctatgcaatggcttcccgggatgtcttccttctgaagagtcagcctcgctaccggaacttaaacttggaagtttatgtgacattctttgagatctacaatgggaaggtgtttgatctgctcaacaagaaggccaagctacgtgtactagaagacagcaagcagcaggtgcaggttgtgggacttcaggagtacctggttaactgtgctgatgatgtcatcaagatgctcaacatgggcagtgcctgcaggacttctggacagacttttgccaactccaattcttcccgctcccatgcctgcttccagattcttcttcgagccaaagggagattgcatggcaaattctccttggtggatctggcagggaatgaacgaggggctgacacttctagtgctgaccgccagactcgcatggagggtgcagagattaacaagtctctcctagcactgaaggagtgcatcagggcgctgggacagaacaaggctcacaccccattccgtgagagcaagctgactcaggtgctaagggattcattcattggggagaactcgaggacttgcatgattgccatgatctcaccaggcataagctcctgtgaatatactttaaacacgctgagatatgcagacagagtcaaggagctgagcccccacagcgggctcagtggagagcagccaattcaaatggaaacggaagagatggaagccagctctaatgggacctcgctggcagtcaatttcaaggaagaagaggagctgtcttcccagatgtccagctttaatgaagccatgagtcaaatcagggagctggaagagagggccatggaggagctcagggagatcatacagcaaggaccaggctggcttgagctctctgagatgactgatcagccagactatgacttagagacctttgtgaacaaagcagaatctgccctgactcagcagactaagcacttctcagccctgcgagaagtcatcaaggccctgcgtgtggccatgcaactggaagaacaggctagcaaacagatgaacagcaagaaacggcaccaatgatgacttcaataaagatctgtttatgtcacaccagcctcttcccctatccagcaaactttgggcaccttctggctttggttagggactgagttggatgggttttggtaaatgccaggtaaggggcatcaggcccaggaagactcggagagagaattgctgttctcttgcttagtttggagcaggaggaaggagcttttcatgactgcttccccttttcctccctatcagagggggtgctgtttgggtagtctccctgcggcagcaccctgcccctctgcaacagctgctgatagacaacctgcaaggtccaggctctgggagagaaattggtcctcgtccagcttctactgcctttggtctgtggtatcacccttgctctgagcactcttgtgtcagaaaaaaaaaagtttttgagacctctgttttagttttagaaatccaagatttccatttcctgctgtatgtatttttatgttgtacctaacaataaagaaaga

SEQ ID NO: 3434 - DNA, 1041 bp, Cricetulus griseus
  misc_feature (518)..(544): n is a, c, g, or t
  misc_feature (664)..(681): n is a, c, g, or t
  misc_feature (769)..(802): n is a, c, g, or t
  misc_feature (1021)..(1040): n is a, c, g, or t
cacaaggaagaggaactactggggagcagtggaggaccccctcctgaggagcctcccaaggaaggcaacccagcagaaatcaatgtggagagggatgagaagctgatcaaggtcttggataaactccttctctatttgcgtattgtgcattctctggattattacaacacttgtgagtaccccaatgaggatgagatgcccaaccgctgtggcataatccatgtccggggacccatgccgcccaaccgaatcagtcacggagaagtgctggagtggcagaagacgtttgaggagaaactaacccccctgctgagtgttcgtgaatcctttctgaggaagaggcccagaagatgggtcgtaaagactgaacaggaagtggagaagtttgttacctccaacacacaggaactgggcaaggataagtggctatgtcctctcagtggcaagaaattcaagggccctgagtttgtgcgcaagcacatcttcaataagcacgcggagaagatcgaggaggtgannnnnnnnnnnnnnnnnnnnnnnnnnntcctcacggatgccaagcgcccagcattgcccgagatgaagccagctcagccacctggccctgcccagatactccccccaggcctgaccccaggacttccctacccacaccagacgccannnnnnnnnnnnnnnnnnggccagcccgcccttcccatctttgggctatggagctggtgctgtccgccctgcaggtcccaacaggagggcctccatatccccatgnnnnnnnnnnnnnnnnnnnnnnnnnnnnnnnnnnttttcgaggccaaggaggatatcctgggaaacctcggaacaggatggttcgaggagacccgcgggccatagtggagtatcgggacctggacgccccagatgatgttgatttcttttgagacatctgccgccctcactctacatctgctgccctctatccccgggaccacttaccccatgagctgacaggttttttgtacgttatttttcctgctagttnnnnnnnnnnnnnnnnnnnnc

SEQ ID NO: 3435 - DNA, 2216 bp, Cricetulus griseus
  misc_feature (45)..(65): n is a, c, g, or t
  misc_feature (569)..(586): n is a, c, g, or t
  misc_feature (1007)..(1024): n is a, c, g, or t
  misc_feature (2176)..(2190): n is a, c, g, or t
ttgggtctttgacttcgagtcgtgagagagagtcgtgagtcattnnnnnnnnnnnnnnnnnnnnncagaatgcattttagggactttaactacaattttagctccctgattgcctgtgtggcaaacggtgatgtcttcagcgaaagtgaaaccagggccaaatttgaatccctcttcaggacgtatgacaaggacatcactttccagtattttaagagcttcaaacgtgtccgaataaacttcagcaaccccttatccgcagctgacgccaggctgcagctgcataagacggagttcctggggaaggaaatgaagctgtactttgctcagacgttacacataggaagctcacacctggctccgcccaatccagacaagcagttcctcatctctcctcccgcctctccaccagttggttggaagcaagtagaagacgctaccccagtcataaattacgatcttttatatgctatctccaagctggggccaggtgagaagtatgagctgcatgcagcaacagacaccactcccagtgtggtagtccacgtgtgtgaaagcgaccaagagannnnnnnnnnnnnnnnnntggagagaatgaagagacccaagccaaaaattatccagacgaggaggccagagtacacgcctatccacctcagctgagctggctcacagatggagacggcacattctaaaccccactcatggggagggatcttttactgtgcaggtggctggtcatagctttggaggtgacagccgtgaccactgtggcagaaattccagttcatgttgactcagaagagaatcaaggctttgtctccttgttctgatactgcacctcagtccatgtccgtggcacccaggaatgtcttgggccattcactgagttggtggtaatcacacaaggatatctggggacatctccagaaaactgataatggtagtgtcttgtactcactcttttctaggttctgtttttgccaaggacaggttgactggtggcnnnnnnnnnnnnnnnnnngtttccaaccagcattcagggtccaggccccactggtaggcagaggcaccccacaaagccaccaagtgtccagtgcagaaaggttatgggacaaccccagtgccatgtggaaattgtacgtctcatttttcccctcgtgttctaacgttcacgcatgtatgactgggttccaagactaacctttgctcgtgtatgaatacactgttgttttccgccttgggaagctggggagacaggcactggaaaactatggtctttcctggtccctggccttctctgcaacagcacccatacgtggggtcgcaaccgggagatgcccacacgtcaccctgtccagcgcaccatgtcacctgtgctttcttgcacaagttgatcttgagttcctgtgtagaatgtagcttatacgatggcagacaccagttttgctgtcaggtgccagtgggtgggaagttgtaggttaggtgtttgggttcagacatcagtttctattgtttctttcatggagtggtttatatgtgaatttcagccaaaaacctctttgggaactgttgattgagacagtttttcaccccattgaaacatgaagataaacttgtaaataaagccaagagcatatcttaatgcctgtggtgtacctgggtgagaacagagggtagaaggagtctcgagctccctgtgacttgcgtgtggtagaaatatctgtcatgtgtttaacgggatgactttggagcatgtggagtcatagctgtgtgttgctagagggacacaggcctttctttcccctttcatcccagatggaccgtgaccatttgggactttctccttttgtagtcaccacgtgtgtgtctggtaaataggtattctgttttggtctcacagcaccattacaagtctgtcactctgaaataacctaatgccaattaacagtgcatgctttgggagttgggaaggcagcttcctctggggagtgtatttgctgacattgagttttccatcagtcctcaatgagaaatggatggcgtgtttgccaaaccctgttcacagcactcaggggagggtgccagcaaggtggagaccggcctcacattgctgttctgattcctacttcagtgctttggaagccggagaggccaacctcaagggtattttttnnnnnnnnnnnnnnnataaatcagcacagcctgctctctgg

SEQ ID NO: 3436 - DNA, 3249 bp, Cricetulus griseus
  misc_feature (2248)..(2263): n is a, c, g, or t
  misc_feature (2395)..(2412): n is a, c, g, or t
  misc_feature (3221)..(3249): n is a, c, g, or t
ggcacgagcatgaaaccagcgaaagctaagatgcccaggaaacctgtattaaaaaaaggatctcagacaaaccttaaagatccagttggggtgtattgtagggtgcgcccactgagttgtcctgatcaagaatgctgtgtagaagtggtcagtaatacaacggtgcagctccatactcctgagggttatcgacttaacagaaatggagactataaggagactcagtattcatttaagcaggtatttggcactcacaccactcagagggaactttttgaagttgtggctagtccattggtagatgacctcattcatggcaagaatggtctgttgttcacatatggtgttacaggaagtggaaaaactcacacaatgacaggttctccagggtccggaggtctgcttcctcgttgtttgaacatgatctttaacagcataggatcatttcaagcaaaacgttatgtttttaaatctaatgataggaacagcatggaaatacagtgtgaagttgatgccttattagaacggcagaaaagagaagctgtatccattccaaagaccccctctagcaagagacaagcagatccagaattttccgatatgataaatgtacaagaattttgcaaagcagaagaagttgatgaagacagtgtctatggtgtatttgtctcttacattgaaatctataataattacatatatgatctattggaagaggtgcagtttgatcccataaagcccaaactcccacaatctaaaatactgcgggaggataagaaccacaatatgtatgttgcaggatgtacagaagtagaagtgaaatctacagaagaagcttttgaagttttttggagaggtcagaaaaagagacgtattgctaacacccatttgaatagagaatccagccgttcacatagcgtgttcagcattaaactcgtccaggctcccctggatgctgatggagacaatgtcttacaggaaaaagaacaaattaccataagccagttgtctctggtagatcttgctggaagtgaaagaaccaaccggactaaagcagaagggaacagattacgtgaggctggtaacattaatcagtcactgatgacgcttagaacatgcatggaagtccttcgagagaaccagacatatggaactaacaagatggttccgtatcgagattcaaagctaactcatctgttcaagaactactttgatggggaagggaaggtgcggatgatcgtgtgtgtgaatccaaaggctgaagattatgaagaaagcttgcaagttatgagatttgctgaagtaacccaagaagttgaagtagcgagaccagtagacaaggtgatatgtggcttgacaccagggagacgatatagaaacctgcctcggggcggcccagttggagatgaacctttggtgactgaagtgagtctacagagcttcccaccactgcctccatgcaaacttttggatatcaatgatgaggagacccttccaaagctgatcgaaactttggagaaacgacatcgcctacgccaagtaatgactgaggagcttaacagacaatgtatgactttcaaagccttattaaaagaatttgacagttctctttcaaataaagaaaactacattcaggaaaaactaaatgaaaaagaaaaattgatctcaggacagaaatcagaaatagaacgactggaaaagaaaaataaaacattggagtataagatcgagattttggagaaaacaaccacgatctatgaagaagataaacgcaatctgcagcaggaacttgagagccagaatcagaagcttcagcggcagttttctgacaagcgcagattagaagccaggttgcaaggcatggtgacagaaacatcgatgaaatggcagaaggaatgtgaacggtcggtggcagccacccagctggagatgcagaataaactgtgggtcaaagatgaaaagctcaaacagttgagggccattgtgactgaaccaaaacctgagaagccagagagaccctcccgagaaagggaccaggaaaaaatcattcagagatcggtctctccttcgcctgtgcctctttctagtaacaatattgctcagatttccaacggccagcaactcatgagccaaccacagctacacaggcgctctaactcttgcagcagcatttctgtagcttcctgtatttcggaatgggagcagaaactatctccgttcagcacacctgtcaatgtcacctctcttnnnnnnnnnnnnnnnnaggagccaggacaaagtaaaacatgtatcgtgtcagacagaaggcgagggatgtactggactgaaggcagggagatggtccctacattcagcagtgagataggcgtagaagaggaccattgccacaggaacnnnnnnnnnnnnnnnnnncacagaaggtcccgctctgcagggagcagatgggtagatcataagcctgcctctaatgtgcaaactgagacagtcatgcagccacatgtccctcatgccatcacagtatctgttgcaaatgaaaaggcgctagctaagtgtgagaagtacatgctgacccaccaggaactagcctccgatggggagattcagactaaagtaattaagggtgatgtttataagaccagaggtggtggacaatctgttcagtttactgatattgagactttaaaacaagaatcgccgactggtagtcgaaaacgaagatcatccacagtagcacctgcccaaccagatggtacagagtctgaatggaccgatgtagaaacaaggtgttcagttgctgttgagatgagagcaggatctcaactgggacccggatatgagcatcatgcacaacctaagcgaaagaagccttgacctgatagccctggtggccgaagaatgtttttgtttgtgttggtgatttctccaaagctgtgccagacgcagtatctgaatcatcctacagaagaatgtatctggatcacattgtattttttattgtgacttttccaactgttctgaatattttctaaggttttataaaaaaaaaaaatgctgctattgattagccgcaaaaaatgcactttagacatatttaagaatttaaagatggtgagtgggcaatggtaaaaccattttaggaagatgtttagaattctgtatgtatatattcactttctgcttttatatatgccaaaagaattgaaataaaaagcactaaaaannnnnnnnnnnnnnnnnnnnnnnnnnnnn

SEQ ID NO: 3437 - DNA, 2312 bp, Cricetulus griseus
  misc_feature (2286)..(2312): n is a, c, g, or t
cgggggtgcggtgctatcccggctccagaccacttcgcggaggctctgctcgggctgcgtcgcgcaggctcgcagaggacgacggccccgggtcgctggccccggaccccttccttcccttgcagcccgtcccggccgagcacagtggacatgcaggcgcagaggccccctttgttggaagtgaagaggaactttgagctgaagacaaccctggtcaaggcctcttccgcccgcctttcagggagcaggctcaagaggggccctgaccagatgaaggaagccctagagcctgcaaagaaacggacacgaggcctgggtgcagtgaccaaaattgacacatcccgctccaaaggaccactcctgagctcactgtcgcagccgcagggccccactgcagctcagaaaggccctaagaagacaggacctcgtggttgcactgccgttggatcagtgctgaagaaccagaagctggctcccactgctcctgcccagaagcctgtcaggaagaggcctggtaagcgtcctgactgggacttaaagggtcagttgtgtgacctcactgaagagctgaaatgctaccgggagaagactcaaaagctggaccaggagaaccaagggcttcaggagcaacttaaagaagcccaggagcaggccgcagccctggggacagagcggaacaccctggaaggggagctggccagtgtgcggacgcaagcggagcagtgccagcagaaactggaggctctgtgtgcccgtgtcttggagctggaggaatggctgggcaccaaggaaaacctgattcaggagctccagaaagagcagctggaattgcaggaagagcggaaggcattggccacccgactggaagagcaagagaggaggttacaggcctcagaagccgctctgctaagcaacgaatcggaggtggtgtgtctgcggcagaagaccgcagcccaggtgaccttactggctgagcaaggtgaccggctccacgggctagagatggagcgccgccgactccacaaccagttgcaggaacttaagggcaatatccgggtattctgccgggtgcgccctgttcttgcaggggaacctactccatcgcctggctttctcctgtttccccatggccctgctggaccctctgaccccccaacccgccttagcctttcacggtctgatgatcggcgttcgaccctgaccagggcgcctgcacccactacgcgccacgatttctcctttgaccgggtgttcccaccaggaagcaaacaggaggaagtgtttgaggagatttccatgctggtccagtcggcactggacggctaccctgtgtgcatctttgcctacggacagaccggcagtggcaagaccttcactatggagggcaggcctgggggagacccccagttggaggggctgatccctcggcgcatgcggcatctcttctctgtggctcaggagatgagtggccagggctggacctacagttttgtggcaagttacgtagagatctacaatgagaccgtccgagacctgctggccactgggacccggaaggggcaaggcgagtgtgagattcgtcgagcaagaccaggcagtgaggagcttactgtcaccaatgcacgctatgttcctgtttcctgtgagagagaggtggaggctctgctccatttggcccaccagaatcgagctgtggcccgcactgcccagaatgagagatcatctcgaagtcacagtgtgttccagctgcagatttctggagagcatgctgctcggggcctgcagtgtgtcgctccccttaaccttgtggacctggctgggagtgagcggctagaccctggtttaaccttaggccctggggaacgtgatcgccttcgggaaacacagtccattaatagcagtctgtctaccctgggactggtcataatggccctgagcaataaggagtcccacgtgccttaccgaaacagcaagcttacctacctgctgcagaactcgctgggtggcagtgccaagatgctcatgtttgtgaacatttcccctctggaagagaatgtctctgagtctctcaattcactacgttttgcttccaaggtgaaccagtgtgttatcggtactgctcaggctaataagaagtgaagatggccagagcctggttccgctgccgctgggttgattgtgtctctctctgtgtgtactgggggggagaggggggtgagagatacgcttttattgggtggacatcatttgtacccaactatcaaataaagaaattttgttgtagannnnnnnnnnnnnnnnnnnnnnnnnnn

SEQ ID NO: 3438 - DNA, 2061 bp, Cricetulus griseus
  misc_feature (298)..(315): n is a, c, g, or t
  misc_feature (481)..(505): n is a, c, g, or t
  misc_feature (562)..(595): n is a, c, g, or t
  misc_feature (870)..(886): n is a, c, g, or t
  misc_feature (888)..(905): n is a, c, g, or t
gtcaacttctcagagttctcgaagaagtgctcagaaaggtggaagaccatgtctgctaaagaaaagggaaaatttgaggacatggcaaaggctgacaaagctcgttatgaaagagaaatgaaaacctacatcccccccaaaggggagaccaaaaagaagttcaaggaccccaatgcacccaagaggcctccttcggccttcttcttgttctgttctgagtatcgcccaaaaatcaaaggagaacatccagggctgtccattggtgatgttgcaaagaaactgggagagatgtggaacnnnnnnnnnnnnnnnnnnaagcagccctatgaaaagaaggctgctaaactgaaggagaagtatgaaaaggatattgctgcttacagagctaaaggaaaacccgatgcagcgaaaaagggggtggttaaggcagaaaagagcaagaaaaagaaggaagaggaagatgatgaggaggatgaagagnnnnnnnnnnnnnnnnnnnnnnnnngaagacgaagatgaagaagaagatgatgatgatgaataagttggttctagcgcagtnnnnnnnnnnnnnnnnnnnnnnnnnnnnnnnnnnctcattaaagcatttaacccccctgtacacaactcactccttttaaagaaaaaaaaattgaatgtaaggctgtgtaagatttgtttttaaactgtacagtgtcttttttttgtgtgttaacacactaccgatgtgtcttggatggtcctgtcctggtggtattttcaatgaccactaacctgcctggtacagtctgggggttgtaaattggcatggaaatttaaaggcaggttcttgtttacacagcacaaattagttatatatggggacggtannnnnnnnnnnnnnnnncnnnnnnnnnnnnnnnnnnggttttttttttccatcttcagttgtctttgatgcagcttatacgaaaataattgttctgttaactgaataccactctgtaattgcaaaaaaaaaattgcagctgttttgttgacattctgaatgcttctaagtaaatacaatttttttttattagtattgttgtccttttcataggtctgaaatttttcttctcaaggggaagctagtcctttgcttttgcccattttgggtcacatgaattattgcagtgtttcttttcgtatagttagctggagaaaagcttttatctacacaccctgcatattgtgatgggtaacattttcatccatagttgaaagcccaaaattgtgattagttggataagagatagtacataaaccatgtgcaaaactgagagtgatcaattctatcacaccatggaataagaatcgaacaatctgaaagtctgccttgaaggactagtagaaaattgtgttctaatccttacgtgaggactcttcttaacgtcattactgtgtaatggcagttacattctgcagttccctattaaagacctgagaatgtatccctcaaaagcgtgagctaaaatacaagactgccatattaaactttgtgacattggtcctagcgaaggctatgataagaacgctggctgtaatgcctttgcccatctatctaaatacaggattgctcaggaaacttgactgtttaaaaaaaaagtatttttaattagttgagccagcttttcttaaaattatgccacatataaaattaagggtatattttcctacattgtgatttgtcccttataaatcagatacaaggaaagatgataaactttgcatattagtaccagttgtccaatccatttggtttttctttataaaacccaaactcattagtcatgtttaatctgcttagcagttagggaacaatttggcaattttgtgttttttttttgagattatcattctcttaaagtgccagtgtttttaaaatagcgttctgtaattttacacgctttgtgatggagtgctgtttgttatataattttgacatgggttctttacattgcgtttgtttatgtaatttgaggaggaatactgaacatgagtcctggatgatactaataaactaataattgcagaggtttt

SEQ ID NO: 3439 - DNA, 900 bp, Cricetulus griseus
  misc_feature (127)..(155): n is a, c, g, or t
aacacgcggtgtcttgtatgcattgaatggcatagaccacgtgggacctaatttgcaagtattgggtcttcgacttcaagtgcaatgtgtatgaaaaccaatctgagccttgtattctcttaaatannnnnnnnnnnnnnnnnnnnnnnnnnnnnccgcgtgagctgttccaaaaagggttctcgggtcatttcaaagctgcgtggggggagctcagcaataccgtatcagctgtgacctccctcagtcacacccaccactgcaccctagtcctttgacatactccagttttgggaatttagtaatttttacttacaaatttacctttttttgtattctgcaatggaactgtttttggtttgttttaaattctatggaactgactcattgaagcaraagttggtccccaggcaggacagaagctcggtgcctgtgtggacggctgggtttgggttcactcacatgctgatgtgcattggggttttgctagttttgttttgaggaaaatgtctggagtaaactggttttctgaaacaactttggttagaagaaaatgggttgttctggatttctgggcaatccttgaaatttcctggaaataaaaacaaatgatcggtcctccaaaggtattcttcagctaagacttatgtgtcttaagaaaagctactagaagaaaaggaaatgaatttggtgatgtacttgattatatatgatgagtattttttttctgttaaactggaaataaatctattaggaataatgtaaccaaaaaatgtgaatccgaagaatgtttttttgccaatagtttatagcaggtacactgaaccaaagtgatggaatttgtaaaaatggtaattagtaccaaccacattcactgtccccgatctgaacacccagcga

SEQ ID NO: 3440 - DNA, 873 bp, Cricetulus griseus
  misc_feature (681)..(681): n is a, c, g, or t
  misc_feature (765)..(779): n is a, c, g, or t
acaatggagtagtcttgtccaccgagagcagtgtggcagtatatggaacactaaacctaactccaaaaggcaaacaggctccgggaggccatgagctgagctgtgacttctgggagctggtggggctggccccagctgggggggctgataacctgatcaatgaggagtctgacgtagacgtccagctcaacaaccggcacatgatgatccgaggagagaacatgtccaaaatcttgaaagcacgctccatgatcaccaggtgcttcagggatcacttcttcgacagaggctactgtgaagttactactccaacactggtgcagacgcaggtggaaggtggggccacactcttcaagcttgactattttggagaagaagcgtttttaacccagtcctcgcagctgtacctggagacctgccttccggccctgggggatgttttctgtattgcccaktcatacagggctgaacagtccagaacacgaaggcacctggctgaattcactcatgtggaagctgagtgtcccttcctgacctttgaggacctcctgaaccgtttagaggacctagtgtgtgatgtggtggacagagtcttgaagtcaccagtggcaagcatagtgtatgacctcaacccgaactttaaaccccctaaacggcctttcaggcggatgaactattcanaagctatcgagtggctgagggagcacgatgtaaagaaagaagacgggacactctatgaatttggagatgatattcccgaagctnnnnnnnnnnnnnnnacagacaccattaatgaaccaatcctgctgtgtcgggttcctgtggagatcaagtccttctatatgcagcgatgtgcctgagatcctcgactta

SEQ ID NO: 3441 - DNA, 580 bp, Cricetulus griseus
  misc_feature (247)..(262): n is a, c, g, or t
  misc_feature (426)..(518): n is a, c, g, or t
agccggtgctaagaagtcgctctgagatcgcgccgcttargtttttctgttcctttttttcttcctgtttatctccaagcagccagcggcccatagaaacatgaccaccaatatgggccccttacatccatactggcccaggcacttgaggctggacaactttgtgcctaatgacctccctacctggtatatcctggttggcctgttctccgtctctggggtcctaattgtgaccacttggctgctnnnnnnnnnnnnnnnngttgccccacttggaaaatgtcgtcgactggccctgtgctggtttgctgtgtgtgcattcattcaccttgtgatcgarggttggttctctttctaccatggcatccttcttgaagaccaagctgtcttatcccaactctggaaagagtattccaagggagacannnnnnnnnnnnnnnnnnnnnnnnnnnnnnnnnnnnnnnnnnnnnnnnnnnnnnnnnnnnnnnnnnnnnnnnnnnnnnnnnnnnnnnnnnnnnttctccaccagaaatccttccgctttatcctacagctcgtggtctctctgggccagatgtac

SEQ ID NO: 3442 - DNA, 554 bp, Cricetulus griseus
  misc_feature (508)..(508): n is a, c, g, or t
agtgggctttcggatcatgtctggtggctccgcggattacaacagagaacatggcggcccagagggaatggaccccgatggtgtcatcgagagcaactggaatgaaattgttgataactttgatgatatgaatttaaaggagtctcttsttcgaggcatctatgcttacggttttgagaagccttcakctattcagcagagagctattattccttgtattaaagggtatgatgtgattgctcaagctcagtcaggtactggcaagacagscacatttgctatttccatsctgcaacagktggagattgagttcaaggagacccaagcactagtattggyccccaccakataactggctcaacagatccaaaaggtaattktggctcttggagattatatgggagcaactkgycrtgcttgcrttggaggaacaaatgtycsgaatgagatgcwgaagttgcasgctgaarctsctyatattgktgkgggyacaccwtgaasagtcgtntgatatgctaaacagaagatacctttctccaaatggatcaaaatgt

SEQ ID NO: 3443 - DNA, 621 bp, Cricetulus griseus
ttacctcagtggcagacggctcctggctgacggctggcaggaagcakggcgtcgggatgagtgcaggctcggaccccgtggttatcgtctctgcggcgcggaccgccatargctccttywwtggtgccctgtctactgtgcctgkcsacgacctcgggacaactgtcatcaaagaagtcctgcakagggccaaggtggccccasaagadgtgtccgakgtcatattwggacacgttttgacggcaggttgtgggcagaatcctactcgacaggccagtgtgggtgcakggatcccctactcagttccagcatggakctgccakatgatctgyggctcawgcctcaaggccgtgtgtcttgcagcccagtccatagccataggtgactccakcattgtggtggcaggaggcatggagaacatgagcaaggcccctcactyggctcacctgakagcakgagtcaagatgggtgakatgccgctagctgacagcatactgtgtgatggtcttacagatgcgtttcacaactatcatatgggcatcacagctgagaatgtggccaaaaaatggcaagtgagtagagaagcccaggacaaggttgccgttgtgtcacaaatcaggg

SEQ ID NO: 3444 - DNA, 656 bp, Cricetulus griseus
  misc_feature (442)..(471): n is a, c, g, or t
agtgccggggccagtcggtggtccttccccacctcacccacttctcctgcacagatgatgtgtttgcctgctttgccacccctgcagtctcgtggcgcctcctgtctgtggagcatgaagactttttaacagttgcagattcactgaagaaagaatttgatagtccagaaactgctgatctgaggtttcgaattgatgggaaatatattcatgtccataaagctgttttgaaaatcaggtgtgagcacttccgatccatgttccagtcctactggaatgaggacatgaaggaggtgatagagatagaccagttttcttaccccgtgtaccgtgcctttctccagtacctctacacagacacagtggatctgccacccgaggatgccataggtctcttggacttggcgacatcgtactgtgaaaacagactgaagaggctttnnnnnnnnnnnnnnnnnnnnnnnnnnnnnntggaaaacgctttctcattattctctgctgcagtcagatatgatgcagaggatttagaagaattctgctttaagttttgcatcaatcatttgacagaagttacacagactacggcattttggcaaatggatggccccctgctaaaggagttcattgctaaagccagtaaatgtggagcctttaag

SEQ ID NO: 3445 - DNA, 894 bp, Cricetulus griseus
aaacagacaactgctaaatgaaagaattaaactagaaggtattattactcgagtagagacttacttgaatgagaatctgaggaaacgcttggaccaagtagaacaggaacttaatgaactgagagagacagaaggtggtactgttcttactgccacaacatcagaacttgaagctataaataaaagagtaaaagatactatggccagatcagaagatttggataattccattgacaaaacagaagctggaattaaagagctccagaagagtatggagcgctggaaaaatatggagaaagagcacatggatgccataaatcatgacaccaaagagctggagaagatgaccaaccgacagggcatgctgctgaagaagaaggaagagtgcatgaagaaaatccgggagttggggtcccttcctcaggaagcctttgaaaagtaccagacactgagcctgaagcagttgtttcgaaaacttgagcagtgcaacacagaattgaagaagtacagtcacgttaacaaaaaagctttagatcagtttgtgaatttctctgagcagaaagaaaagttgataaagcgacaagaggaactggataggggctacaaatcaatcatggaattaatgaacgtgcttgaacttcgaaaatatgaagctattcagttaactttcaaacaggtatctaagaacttcagtgaagtattccagaagttagtacctggtggcaaaacaactttggtgatgaagaaaggagatgtggagggcagccagtctcaagatgaaggagaagggagtggcgaaagtgagaggggctctgggtcacagagcagtgtcccatcagttgaccagttcacaggagttggaatcagggtgtcatctacaggaaagcaaggtga

SEQ ID NO: 3446 - DNA, 1053 bp, Cricetulus griseus
  misc_feature (400)..(417): n is a, c, g, or t
aagttgttggcagttagtaagaatcccagcaaacctcattttaatcactatatgtttgaagcaatatgcttatctataagaataacctgcaaagctaaccctgctgctgttgtgaactttgaggaggctctgttcctagtgttcactgaaatcttacagaatgatgtgcaagaatttatcccctacgtttttcaagtgatgtctttgcttctggaaacacacaaaaatgatatcccgtcttcatatatggccttgtttcctcacctccttcagccagtgctctgggaaagaacaggaaacatccctgctctagtgaggctccttcaggcattcttagaaagaggctcaagtacaatagcaagtgctgcagctgacaaaattcctggattactgggtgtcnnnnnnnnnnnnnnnnnntccaaagcaaacgatcaccaaggcttctatcttctcaacagcataatagagcacatgcctcctgagtcagttgaccaatacaggaagcagatcttcattctactgttccaaagactgcagaactccaagaccaccaagtttatcaagagtttcttagtgtttattaatttatattgcattaagtatggggcattagcattacaagaaatatttgatggcatacaaccaaagatgtttggaatggttttggaaaaaatcattattccagagattcaaaaggtatctggaaatgtggagaaaaaaatttgtgcagttggcataaccaaattactcaccgaatgtccaccaatgatggacacagagtacaccaagctatggactcctttgttacaatctctcatcggcctttttgagttgccggaggacgacaccattcctgatgaagagcattttattgacatagaagatacaccagggtaccagactgccttctcacagctagcatttgctggcaaaaaggaacatgatcctgtagggcagatggtgaataacccgaaaatccatctggcacagtcacttcacaaactgtctactgcctgtccggggagggttccctcaatggtgagcaccagcctc

SEQ ID NO: 3447 - DNA, 561 bp, Cricetulus griseus
  misc_feature (282)..(299): n is a, c, g, or t
  misc_feature (423)..(469): n is a, c, g, or t
tcagcgctaggcgcccggcccagcttctttttcaaaatgtctactgtccacgaaatcctgtgcaagctcagcttggagggcgatcactccacacccccaagtgcctatgggtcagtcaaaccctacaccaactttgatgctgagagggacgctctgaacatcgagacggctgtcaagaccaaaggagtggatgaggtcaccattgtcaacattctgactaaccgcagcaatgcacagagacaggacattgccttcgcctatcagagaaggaccaaaaaggannnnnnnnnnnnnnnnnngtcagccttatctggccacctggagtcggtgattttgggcctattgaagacacctgcccaatacgacgcttctgaactgaaggcctccatgaagggcctggggactgatgaagactccctcatnnnnnnnnnnnnnnnnnnnnnnnnnnnnnnnnnnnnnnnnnnnnnnngagtgtacaaggaaatgtacaagaccgatctggagaaggatatcatttctgacacatctggtgacttccgaaagctgatggtcgcccttgca

SEQ ID NO: 3448 - DNA, 526 bp, Cricetulus griseus
catcaggatggtgcaggmcaagagctggaccctgaagaagcactttgaaggcttccctactgacagtaacttcgagttgaagactactgaactcccacccttaaataatggggaggtcttgctggaagccctgttcatctctgtgratccttamrtgagaattgcatcgaaaagactgaaggagggtgataggatgatgggtgagcaagtggccagagttgtggaaagcaaaaatccagccttccccgcaggaaccatcgtagtggctttatcaggctggacatcacattccatttctgacgggaatggactgaggaaactgccagcagagtggccagacaagttaccactgtctttggctttggggacagttggcatgccaggcctcactgcctactttggcctgcttgacatctgtggtgtgaagggtggagaaacagtgatggtcaacgcatcagcaggagcagtggggtctgtagtggggcagatagctaagctcaagggctgcaaagttgttggtgcagca

SEQ ID NO: 3449 - DNA, 596 bp, Cricetulus griseus
  misc_feature (263)..(278): n is a, c, g, or t
aaatgaatcaccaacctgcagttttgtgtcagtgcccaaaggagagaggttgatggtgcttaacagacatgaagtatgtgtagtaagagtatttatccagaattaaaatatagggttgtgtaaaaggcggggagagaagagtagagtgagttggaggaaggccgtgctcccagtgggtcccaktgcagcccatctgcaggtctcgctcakgcaggcgctcacacgtgggtctcaccactgkgacaactatgctttcactgccnnnnnnnnnnnnnnnntcttactgagagccaagggcaacacaaagctatgactgcaccgtgatgctggacttttcacctcaacttaaatgaagttttgtccacggtctggaccatctaagagtgagtagctgtctgctgtttcaktcgtcaggagccgaaattgtttccatcactccagagtggagaggactttcccacakccctatggagcttgcaatctgtgattgccttgtaaaaggttgagtgtgcaggtcactgcattaaacacgcggtgtcttktatgcattgaatggcatakaccacgtgggacctawtttgccagtattgggtcct

SEQ ID NO: 3450 - DNA, 581 bp, Cricetulus griseus
  misc_feature (8)..(8): n is a, c, g, or t
  misc_feature (69)..(69): n is a, c, g, or t
  misc_feature (155)..(169): n is a, c, g, or t
  misc_feature (465)..(465): n is a, c, g, or t
  misc_feature (473)..(473): n is a, c, g, or t
  misc_feature (508)..(508): n is a, c, g, or t
  misc_feature (574)..(574): n is a, c, g, or t
  misc_feature (580)..(580): n is a, c, g, or t
cgcagaangcggcggtagcgggtggcttgtggtgcagctttaccacagaaggaaccgcgcaggccttantgtgagtggtcactgtagatcccgggaacctggtggccttagtccttcaggtggatcagcgtgcgacatgggaaagaaaaccaagnnnnnnnnnnnnnnntcttcttccgaggatgaggaggagtatgtggtggaaaaggtgttagacagacgcatggttaaggggcaagtggagtatctgttgaagtggaaaggcttttctgaggagcacaatacttgggaacctgagaagaacttggattgtcctgaactaatttctgagtttatgaaaaagtataagaagatgaaggagggtgaaaacaacaagcccagggagaagtcagaaggaaacaagaggaaatccagtttctctaatagtgctgatgatataaaatctaaaaaaaagagagagcagancaatgatntcgctcgaggctttgagagaggactggaaccaganaagatcatttggggcaacagattcctgtggtgacttaatgtttcttaatgaaatggaaagacacanatgaanc

SEQ ID NO: 3451 - DNA, 755 bp, Cricetulus sp.
cgggaagctgaggtttttcctatgtctgaacaatgacgccatcgttttctgggtcttcgaagcagttgcaaagaaatgcccagatggaggacagagggccaaaccaccccagtgaattcataacaggagataacttgcttaagacctgactgtttttaaaagcgaatgccagtgagtgaaatgccagctccctgtacagttactagagctcctgggaatgcatggccagtgacacaagtgagaattggatgttatgaccgtccagaaaagacaagatgagaaagtgcagtattgactgtcttcaaacgcacctgtccttgctcaagtgctgggattgtgtgccaacggctatgatagatatgaatagagcacgagataatgtgcttacagaaagttggttgaattgaatgcaattaatgtttggaggcacttagtcttctagtgtttgaatgtggatggaattaaagctgggtttgtagtgagccattaggattatggcaaatgtctagtgtacagaattcagtgtaggccgggagttgagactggtgtgtgtttagtggattatctgatcagcacatgtgtgacagtgttgatcacaagtcattgccagctctgttcattttcttccctggtctaactcaataattgccatcatgaaaattctgggtgactttttgtgactaaagtcccattgtaagccacattctttgtccagcagtgctcactgactgctgaaataaatgttcatttgcaac

SEQ ID NO: 3452 - DNA, 3443 bp, Mesocricetus auratus
  misc_feature (955)..(999): n is a, c, g, or t
  misc_feature (1860)..(1922): n is a, c, g, or t
ggcccagctggcgcgccgcagctctgggcctgcgcgcaaaggggttaggggtcacggcggcgtagtttgtggcgggaaaagcagtttgatgcgggatggattttaagcggcgacaaggaccaggccctggggtgcccccaaaacgggctcgtgggggtctctgggatgaggacgagccatcgcaatttgaggagaacttggcgttgctggaggagatagaggctgagaatcggctgcaggaggcagaggaggagctgcagctgcccccacagggccctgcaggtgggcagttttccactgcagacattgacccacgctggaagcggcccgccctgtgtgccctggatcccaacacggagcccctcatcttccagcagctagagattgaccactatgttggctcagctgtgccactgccaggaggacccccaacgtcctgtaattcagtgcccatactacgggcctttggggtgactgatgagggcttctccgtctgctgccatatccatggctttgcaccctacttctacacccctgcacctcccggttttggggccgagcacctgagtgacctgcagcgagagctgagcacagccatcagccgggaccagcgtggtgggaaggagctgtcggggccagcagtgctggcaatagagctgtgctcccgtgagagcatgtttgggtaccatggtcacggcccctctccatttctccgcatcaccctggcgctaccccgccttgtggcaccagcccgccgcctcctggaacagggtatccgtgtgccaggcctgggtaccccaagcttcgcaccctatgaggccaacgtggactttgagatccggttcatggtggatgctgacatcgtgggctgcaactggttggagctcccagctgggaagtatgtttggaggacagagaagaaggctacacagtgccagctggaggtggatgtgtnnnnnnnnnnnnnnnnnnnnnnnnnnnnnnnnnnnnnnnnnnnnngtattgcgccccttcgtgtacttagctttgacatcgagtgtgctggccgcaaaggcatcttccctgagccggagcgtgaccctgtgatccagatctgttctctggggctgcggtggggagaaccagagccgttcttgcgcytggcactcacactgaggccctgtgcacccatccttggtgccaaagtgcagagctatgagcgggaagaagacctgctccaggcctggcccaacttcatccttgccatggatyctgatgtgataactggctataatattcagaactttgacctcccatacctcatctcgcgcgcgcaaaccctgaaggtggaccgcttccctttcctgggccgwgtgactggtctccgctccaacatccgagaytcctccttccagtcgaggcaggtgggccggcgggacagtaaggtggtcagcatggtgggtcgagttcagatggacatgctgcaggtgctgctgcgggagcacaagctgcgctcctacaccctgaatgctgtcagcttccacttcctgggtgagcagaaggaggacgtgcagcacagcatcatcaccgacctgcagaacgggaatgagcagacacgccgccgcctggccgtgtactgcctgagggacgccttcctgccacttcggctgcttgagcgccttatggtgctggtgaacaatgtagaaatggcgcgtgtcacgggtgtgccccttggatacctgctcagccggggccaacaggtcaaggtcgtgtctcagctgctgcgccaggccatgcgccaggggctcctgatgcctgtggtgaagactgagggcggtgaggactacacgggagccactgtcattgagccccttaaagggnnnnnnnnnnnnnnnnnnnnnnnnnnnnnnnnnnnnnnnnnnnnnnnnnnnnnnnnnnnnnnncataatctgtgctacaccacactgctacggcccggggctgcccagaagttgggccttaaaccagatgagttcatcaagacacccactggagatgagtttgtgaagtcatctgtgcggaagggcctcctgccccagatcctggagaatctgctgagtgcccggaagagggccaaggctgagctggctcaggagacagaccccttgcggcggcaggtcttggatggacggcagctagcactgaaagtgagtgccaactctgtgtatggcttcactggtgccgaggtgggcaagctgccatgtttggagatctctcagagtgtcactgggttcgggcggcagatgattgagaaaaccaagcaactagtggagtccaagtacaccctggaaaatggctacaatgccaatgccaaggtggtctatggtgacactgactctgtgatgtgccgatttggtgtctcctctgtggctgaggcaatgtctctgggtcgagaggctgcaaaytgggtatctagtcacttcccatcacccatccgactggagtttgagaaggtttacttcccatacctgctcatcagcaagaagcgctatgctggcctgctcttctcctcccagcctgatacccatgacagaatggactgcaagggcctggaggctgtgcgcagggacaactgtcccctggtggccaaccttgttacatcctctctgcgacgaatccttgtggaccgggatcccgatggggcagtggcccatgcaaaggatgtgatctcagacctgctgtgtaaccgcatagacatctcccagctggtcatcaccaaggagctgacccgagcagccgcagactatgctggcaagcaggctcatgtggaactggctgagaggatgaggaagcgtgaccccggcagtgcgcccagcttgggtgaccgcgtcccctatgtgatcatcggtgctgccaaaggcgtggctgcctacatgaagtcggaggaccccctgtttgtgctggaacacagcctgcccatcgacactcaatactacctggggcagcagctggccaagccactgctgcgaatttttgagcccattctgggtgagggccgtgcagagtctgtgctgctccgaggagaccacacacgctgcaaaaccgtgctcaccagcaaggttggtggcctcctagccttcaccaagcgccgcaactgttgcattggctgccgctcagtgatcaaccatcagggagctgtgtgtgaattctgtcagccccgggagtcrgagctctatcagaaggaggtgtcacacctgaatgccttggaggaacgcttctcgcgcctctggacacagtgccagcgttgccagggcagcttgcatgaggacgtcatctgcaccagccgcgactgtcccatcttctacatgcgcaaaaaagtgcgcaaggacctggaggaccaggagcggctgctgcagcgttttggacctccgggcccmgaggcctggtgactcgacgagggacacggaataaagttcagacttttt

SEQ ID NO: 3453 - DNA, 2449 bp, Cricetinae gen. sp.
  misc_feature (1894)..(1912): n is a, c, g, or t
ctaggtcagaccagacatcctgtcacgatgtcctgaaataaataccagccatctcgatgaacaacaggttcaacttctggcagagatgtgtattcttattgatgaaaatgacaataaaatcggggctgacaccaagaaaaattgtcacctgaatgaaaacattgacaaaggattattacatcgagcttttagtgtcttcttgtttaatactgaaaataagctcctgttacagcagagatcagatgctaaaattacctttccaggttgtttcaccaatagttgctgtagtcatccattaagtaatccaggagagcttgaagaaaatgatgccattggtgtaaaacgagctgcacagaggcgcttaaaagctgaattgggaatacccttagaagasgttgatccaaatgaaatgcattatctaacacgaatttactacaaggcccaatctgatggtatctggggtgaacatgaaattgattatattttgtttctgaagaagaacgtaaccttgaatccggatcccaatgagattaaaagctattgctatgtatcaaaggaagaactcaaagaacttgtgaagaaagcagccagtggtgaagttaaattaactccgtggtttaaaattattgtagacacttttctctttaaatggtgggataacttaaaccatttgagtcagtttgttgaccacgagaaaatacacagaatgtgatgtgaatgtgtgtatgaattgaagatttttctacctagttagaatgttttgttgttttcttttgaactgtgctcccttgtatgatacataggtattttacaaccagaattcgtttgagaaaaacttaaaagttttatagtatatatgcactgatatttgtaaaagacatttatgaagaggttattgcaaaattataccacaaataaaacttaatttaacctgtccaaatacatgactgtgacaagattgaagaagtgagtagggctcttcatttttttacattttgacaaacatcttcagaatactttgctatttgccaagtgttctttataccattaaattttatatacgccagaaaaatgagtaaaagagactgcttagctgsttcaaaacagcagtaatagattaaatggtcaaggctggggatacgctcagtggtaccatgattgccttgtaggcatgaggtcatgggttgttgattccctagtccttaaaataattatagcwrtrayrgwtaacaggtaggtccaagggagagtacgtggtatctaatcatcccttatgcttcargacccacttcataaccagaactctggatgctcaagtcttgtacaagattgtrtttgacctatgcacatctttcatgctggattgcttgtagcactgaacacagwgtaaatgctaacataaatgattattatactgtgctttgtggtaagtaaaagtkcatattcagtacagatcaaatattaatatgcagktggtttgaacctttgggtgccttggcccacagatktgaaagggcagktctatatgctaatttttgtcatttttcgttgattttgtgctttaaccattctaagatgttttactacttaactgttacttttagtggtaatggtaactggttaactcttttaaatagttatttaccacttagcaaaatctgttcataattatagtggaagagatgttagtcataaggtgagagtgagttgggaagttacaagagttgggaaaacttttagcactaccagtcctgggcctggataatcttgtagggtctgacctgggttggatgtttaagtagaatctctgcaccctgtacactcagtatcatttagcgcccctttgctaagacaaccaccaccaaaaaatggggggtgggttgggttttgaggnnnnnnnnnnnnnnnnnnncctggctcttcttgaactcactctgtagactagtctagccctggaactcaggatctacctgcttctgtcttccaagtgctaggattaaaggaacggactaccatacccagcaataaccagaattttaatgcatgataccaagtgtccaataggggcagagatacctctagttgagaaccactcactgttctgtagtcagggcttactttagaggtggaaacacaagggaatagcagtgagaaagtttaggatgagtgtgatgaataggcatatattataaggagattttgatgttatagattaggcatatattgagattgtgtcttgattgatgaactttttaaaacttgctacaggtgtgtcaaatttgagatcttaagacagctttagacttaaatgctgtgtaatgaataattttttcttataaaaattttgtaaattttgttaatttcttgataactcaaaagtttatttatttatcttcgaagatacaactatgtagcaagtatttattgaaaattaaaaataaactatttt

SEQ ID NO: 3454 - DNA, 3384 bp, Cricetulus griseus
  misc_feature (58)..(76): n is a, c, g, or t
  misc_feature (527)..(552): n is a, c, g, or t
  misc_feature (741)..(762): n is a, c, g, or t
  misc_feature (2000)..(2015): n is a, c, g, or t
  misc_feature (2815)..(2832): n is a, c, g, or t
  misc_feature (3268)..(3268): n is a, c, g, or t
atggcggaggcctcggagaggctttaccgggtggagtacgctaagagcgggcgcgccnnnnnnnnnnnnnnnnnnnagagtatccccaaggactcgctccgcatggccatcatggtgcagtcacccatgtttgacggaaaggtcccacactggtaccacttctcctgcttctggaaggtgggccactccatccggcagcctgacgttgaggtggacggattctctgaacttcggtgggatgaccagcagaaggtcaagaagacagcagaggctgggggcgtggcaggcaaaggccaggacggaagtggcggcaagtcagagaagacgctgggtgactttgcagcggagtatgccaagtccaacaggagcacatgcaagggctgtatggagaagatagaaaagggccaggtgcgcctctccaagaaaatgctggacccggagaagccacaactgggtatgattgaccgctggtaccatccaacttgctttgtcaagaaccgggaggagctgggcttccggcctgagtnnnnnnnnnnnnnnnnnnnnnnnnnnagcctcctctctgcggaggacaaagaagtcctgaagaagcagctcccaggagtcaagagtgaaggaaaaagaaaaggtgatgaggtggatggagcagatgaggtggccaaaaagaaatctaagaagggaaaggacaaggacagtaagctggaaaaggccctcaaggcccagaatgacctgatctggaannnnnnnnnnnnnnnnnnnnnngcatgttccaccagtgacctaaaggagttgcttatcttcaaccagcagcaagtaccatctggagagtctgcgatcttggaccgagttgctgatggcatggcgtttggggccctcctgccctgcaaggagtgttcaggccagctggtctttaagagtgatgcttactactgcactggggatgtcactgcctggaccaagtgcatggtcaagacacagactcccagccgaaaggaatgggtgacaccaaaggaattccgagaaatatcctacctcaagaaattaaaggtcaaaaaacaagaccggatattccctccagagaccagtgccccagcgccgccgcacctgccaccctctgtcacctccgcacccacggctgtgaactcctcttgcccagcagataagcccctgtctaacatgaagatcctgactctcggtaaactctctcagagcaaagatgaagcaaaggccacgattgagaaactcgggggcaagttgacgggatcagccaacaacgcttccttgtgtatcagcactaaaaaggaggtggaaaagatgggtaagaagatggaggaagtgcaagcagccaacgtgagggttgtgtgtgaggacttcctccaggacgtggctgcctccactaagagtctccaagagctgctctccgcccacagcttatcctcttggggggctgaggtgaaggtcgagcctgttgaagtggcggcccccaaggggaagtcagctgcaccctccaagaagagcaagggcctgtacaaggaggaaggtgtcaacaagtctgaaaagaggatgaaactaactctaaagggaggagcggctgttgatcctgactctggtctggaacactctgcacacgtcctggagaaaggcgggaaggtgttcagtgccacacttggcctggtggacattgtgaaagggaccaactcctattacaagctgcagcttctggaggatgacaaggagagcagatactggatcttccggtcctggggccgagtgggcactgtcattggcagtaacaaacttgagcagatgccatccaaagaggatgctgttgagcacttcatgaaactatatgaagagaagactggcaatgcctggcactcaaagaacttcacaaagtatcccaaaaagttctaccctctggagattgactatggccaggatgaagaggctgtaaagaagctgacggtaaaacctggcactaagtcaaagctcccgaaggnnnnnnnnnnnnnnnncgggatgatctttgacgtggagagcatgaagaaggccttggtggaatacgagattgaccttcagaagatgcccttggggaagctgagcaaaaggcagatccaggccgcctactctatccttagtgaggtccagcaggcagtgtcccaaggcagcagtgactcccagatcctggatctttccaatcgattctacaccctaatcccccatgacttcggaatgaagaagcccccactcctgaacaatgcagacagcgtgcaggccaaggtggagatgctggacaacctcctggacatcgaggtggcctatagtcttctcaggggggggtctgatgacagcagtaaggaccccattgatgtcaactatgagaagctcaaaactgacattaaggtggttgaccgagactctgaggaagctgaggtcatcaggaagtatgttaagaacactcatgccaccacacacaatgcctatgacctggaagtgatggatatctttaagatagagcgtgagggagagagccagcgctacaaacccttcaagcagctgcacaatcggaggttactgtggcacgggtccaggaccaccaactttgctggcatcctgtcacagggtctgcggatagccccacctgaagcacctgtgacaggctacatgtttggaaaagggatctattttgctgacatggtgtccaaaagtgccaactactgccatacatctcagggagacccgattggcttgatactgttgggagaagtcgcccttggaaacatgtacgaactcaagcatgcgtcacatatcagcnnnnnnnnnnnnnnnnnncacagtgtcaaaggcttgggcaaaacgacccctgacccttcggccagcatcaccctggagggtgtasaggttccactggggacagggatcccatcgggtgttaatgacacctgcctactatataacgagtacatcgtctatgacattgctcargtgaacctgaaatacctgctgaaactgaagtttaattttaagacatccctgtggtgaagtgygaggggtgtgctgcacccakcacccaagcctakgggtaaacttccccctggtgcctccacaccacagacaccacaaaacctcagccacaccgctgcctaatggtggcaccctcacccgatctccttagggttctatatagacaggttaaagggctctgggttcaagtcccttgtccgtgttgcactcggtgggagggttgttaggggttttatcctaccangcatagccctgatagacacggctgacagtagarggaaagttggggagargtttttgttttgtttgcctagactagtcttgagggggaaaagccacgtcacagccacaatgtctgcc

SEQ ID NO: 3455 - DNA, 1001 bp, Cricetulus griseus
attggtagtcgctccctgcgggtcctcgctgccacttctgcatcgcgagccgggagaccttcgcggccggccctctctcctgtcacagtctctagtatctagtcgtcgcgactccgccassatgttygaggcwcgcctggttcagggctccatcctgaagaaggtgttggaggctctcaaagacctcatcaacgaggcctgctgggacatcagctcgggcggcgtgaacctgcagagcatggactcgtcgcacgtctccttggtgcagctcactctgcgctccgaaggcttcgacacataccgctgcgaccgcaacctagccatgggcgtgaacctcaccagcatgtccaaaatactaaaatgtgctggtaatgaagacatcattacactaagggctgaagataatgccgatactttagcactcgtatttgaagcaccaaatcaagagaaagtttcagactatgaaatgaagttaatggacttggatgttgagcaacttggaatccctgaacaggagtacagctgtgtggtaaagatgccttctggtgaatttgcgcgcatatgccgagaccttagccatattggagatgctgttgtaatatcctgtgcaaaggatggggtgaagttttctgcaagtggagagcttggaaatggaaacattaagttgtcacaaacaagtaatgttgataaagaggaggaagctgtaaccatagaaatgaatgagccagttcagctaacttttgcactaaggtacctgaactttttcacaaaagctactccactgtctcctacagtaacactcagtatgtctacagatgtaccccttgttgtagagtataaaatttctgacatgggacacttaaagtattatttggctcccaagattgaagatgaagaaggatcttaggcgttgctagaatctgagaaaaccaagcctttgagaactgcttctgagatgccagcatgttttgaagtcttttctgtcaccaagtttgtacctg

SEQ ID NO: 3456 - DNA, 882 bp, Cricetulus sp.
  misc_feature (211)..(267): n is a, c, g, or t
  misc_feature (291)..(348): n is a, c, g, or t
  misc_feature (372)..(427): n is a, c, g, or t
  misc_feature (461)..(494): n is a, c, g, or t
aatgttagagaccttatatctccacaatgacatgccacaactmgacacttctacrygmwccggataaaaaaaataaartatataacatgtgggggtcccaccccarckrraaatsycatttcwckwctyaagaaagggctaataatacccccctgaagaactttttggaaccaacaaacccctgggaacaaaaatgawcsammattwwtgnnnnnnnnnnnnnnnnnnnnnnnnnnnnnnnnnnnnnnnnnnnnnnnnnnnnnnnnnatttccacytgtcattatgacatnnnnnnnnnnnnnnnnnnnnnnnnnnnnnnnnnnnnnnnnnnnnnnnnnnnnnnnnnntaattactaagcaaataatagcannnnnnnnnnnnnnnnnnnnnnnnnnnnnnnnnnnnnnnnnnnnnnnnnnnnnnnntattggctcaacaaatctgctaggkctamtaccnnnnnnnnnnnnnnnnnnnnnnnnnnnnnnnnnnaacctargaatagctatcccacyatgagctggagctgtaatcttadggtttcgacataaaataaaagactcacttgctcactktctyccacaargaacccctattscacttatcccaatactagtaattattgaaacaawtagctkatttattcaacctatagccttagctgtacgtttaacagctaatatcaccgcaggacatctgctaatgcacttaattggaggagctacactagtcctaacctcaatcagcctaccaactgctataatcacmwttattatcttaattatattaactatcctagagttcgctgtagccttaattcaagcctatgtatttacactactagtaagcctatatctacatgataatacgtaatgaccca

SEQ ID NO: 3457 - DNA, 1373 bp, Cricetulus griseus
  misc_feature (972)..(987): n is a, c, g, or t
aaatatgacctacggaatcacccagcttccaagtcgtcgggcaagtccgtcaggctcccagcggaagtggctacaggcggggccgagaaaggcgcgatgacgttgcagtgatgcgggcgtagccgtctgtgagcgtttggcgggatttctgaaagtcgcgcgtccctgggcgaagtgcgtgcagacgggttcctgttcaaagccgtgttttccggaaacgcagctgggaaggctaaaatttgctcctgttcttcacagaagaccggacagaggagccggtgacggtggttcttgtggcgtgagcagacccggccgccaaaggagcgcgcggcccacggcggctgcggaccgtaatggctatgcagatgcagcttgaagcaaatgcagatacttcagtggaagaagaaagctttggtccacaacctatttcacggttagagcaatgtggcataagtgccaatgatgtgaagaaattagaagaagctggtttccatacggtggaggctgttgcttatgcaccaaagaaggaactcataaatattaagggaattagtgaagccaaagcagacaaaattctggctgaggccgctaaattagttccaatgggtttcaccactgcaactgaatttcaccaaaggcgttcagaaatcatacagattactactggctccaaagagcttgacaaactgcttcaaggtggaattgagactggatctatcacagagatgtttggagaattccgaactgggaagacacagatctgtcatacattggctgtaacatgccagcttcccattgatcgtggtggaggtgaaggaaaggccatgtacattgacaccgagggtacgtttaggccagaacggctgctagcagtggctgagaggtatggtctgtctggcagcgatgtcctagataatgtagcatatgctcgagggttcaacacagaccaccaaacccagctcctttatcaannnnnnnnnnnnnnnntagaatccagatatgcactgcttattgtagacagtgctactgccctctacagaacagactactcaggtcgaggagagctttcagccaggcaaatgcatttgkmcwsakktctgaggawgctkctsmgmcwkgcwratgmrtttggwgtwkcwgwggwwrtcaccaaccaggtagtagcccaagtggatggagcagccatgttcactgcagatcccaaaaaacccattggaggaaacatcattgcccatgcatcaacaaccaggctgtacctgaggaaaggaagaggggagaccagaatctgcaaagtctatgactctccctgtctccctgaagctgaagccatgtttgccattaatgcagatggagtaggagatgccaaggactga

SEQ ID NO: 3458 - DNA, 2659 bp, Cricetulus griseus
  misc_feature (117)..(161): n is a, c, g, or t
  misc_feature (196)..(214): n is a, c, g, or t
  misc_feature (217)..(250): n is a, c, g, or t
ccgtgttggctcatcactaaacatgggaggctaaagcagttggctgccgcgagttcgaagccagcctggctatgaagaccctgtttcagccgggcgttggtggcgcacgcctttagnnnnnnnnnnnnnnnnnnnnnnnnnnnnnnnnnnnnnnnnnnnnncagaccaagcgagctccaggacagcctccaaagcnnnnnnnnnnnnnnnnnnngannnnnnnnnnnnnnnnnnnnnnnnnnnnnnnnnnccgtgtttcaaaaagaagacgattccaattgtacagctagatcggaaacagcagtgttcagcgctcttccgaaacggtttccaccaattttgtcctcacagctccaccttagagtacttttcacaaagcgttcgttaagcacagcaacaacgcagaaagaatcctgactgtgtaactgcccctcccctccatttcttaccctccacccacagaatgatttgcccttacttgtcatggcgactatccagctttgtgccagcagtctcgcgaggaatgctgggatagggactttcccctcccatgtgcttctactgactaaaaaaaamaaaagttttgtkcdgraktctaccatcctggctgcaggtagctattgggatcagggggymcctggsatccgggtccggaayctacttcccagcrgggtaacacgctyccccctgaagacctgaagyctggctgacttcytgrgtgctgccatggaggagccacagtcagacctcagcatcgagctccctctgagycaggagacattttcagacctgtggaaactacttcctccaaacaatgttctgtccaccttgccgtcmtcygattccattgaagarctgttcctgtcmgagaatgttrcaggctggytagaagacycaggtgragckctccaaggggtggcagcgccggcggctcctgcagcagaggaccctgtarctgagactcctgcaccggtggcctctgcrccagccactccctggcccctctcatcttctgtcccatcctataaaacctwccagggygactatggyttccgtctgggcttcctgcactcrgggacggccaaatctgtcacrtgcacgtactcmccttccctmaataagcwrttytgscagctggcraaaacatgcccygtscagctgtgggtcarctccacmyctccacctggcacccgtgtccgtgccatggccatctacaagaagytacaatacatgacrgaagttgtaagacgctgyccycaccacgagcgctcctccgarrgcgatrgtttggctcctcctcagcatcttatccgagtggaaggaaatwtgcatgccgartacctggatgacaagcaramwtttcggcacagtgtggtggtrccmtatgagccacctgaggttggctctgactgtaccaccatccaytayaactacatgtgyaatagttcctgcatggggggcatgaaccggcggccyatcctyaccatcatcacrctggargaccccagtggkaacctgctgggacggaacagctttgaggttcgtatttgtgcctgycctgggagagaccgtcgtacmgaggrmraaaatttccaraaraarggagaaccttgcccagarctrcccccaaagagtgctaaacgagcattgcctaccaacacaagctcctctccccmgccaaagaraaaaacacttgayggagaatatttcacccttaagatccgwggtsawgarcgcttcaagatgttycaagarytgaatgaggccttggaaytgaaggatgcwcaggcttyraaggsgtcagaggacartggtgctcactccagctacctgaagtccaagaagggccagtctgcctcccgtcttaaaaaactaatgatcaagagagaggggcctgactcggactgacytccttcctmkgcctcctgtsccccaycagcaacytcccawcccccwcctccttycctgmcattttgtcacttgggtgcttgaaccccrgcytgggtrgatctgtcatctctgwtatctggggagggtggtgggatacaccarkacaccakctyagcttttargattctgrccatgaggaaaggaagaaaattctcaataggtggkgtkrgaatttacaaytggccatgtgcarkgtgaggccccacccaaytctctaagaaagccatctgagtttactttctcctgacttgaaagccacatctrtaaaatgcagatgrgcatacctgcttctcagggtttsttgtgatacttgtgatacttgtcccttccrcaccwtttattaccttgtggcctggactcwgycccctctgtgagtsctggttcctggcccctrttgggkgrtrggttrsyagstsycwgststctgctggcccagcgaaatcctatccagccacttgwtggaccctggcacctaaaatgaaatttcaccccrccckaywcsctgtaagattctatcttgggctctcatrgggtccatawccaccaagacccattttctttccaccctgcactcrggatcagtttctttgaactctgcccagcctttctarcctttctgcatttaccrtccccccctctctttttataccatryccccttttatataccrattwcttattttacaataaaattttgttatcacytgtwa

SEQ ID NO: 3459 - DNA, 302 bp, Cricetulus griseus
cagccctacgcttttctccgtaattctgcagggtcgtcctggcaaccagttgctcagccaatcagcacttggtactacgatccgccctcaacatctggagcaatggcggtaagaagagccctgattgtattggcccattcagagaggacatcgttcaactacgccatgaaggaggctgctgtagagattctgaagaagaaaggatgggaggtggatgaatctgacctctatgctatgaactttaaccccatcatttccagaaaggatatcacaggtaagctgaaggacgcaaagaactttca

SEQ ID NO: 3460 - DNA, 578 bp, Cricetulus griseus
  misc_feature (414)..(456): n is a, c, g, or t
atatgcaaaaaatccagctgtcaactggaaacacaaagatgcagccatttaccttgtcacatctttggcatcgaaagcccaaacacaaaagcatggaatcacacaagccaatgaacttgtcaacctaactgaattttttgtgaatcacatacttcctgatttaaagtcaaataatggtgagttttgtgaaattgtttcttttctgtaacttgcagtgttatcccttgcatttttgctgcagtgatatggcagaagtcaagagctctgtgtgactgcagtgttcaaaggggcagtgatggtgtgatttcctcagcgcctgtctatggaaaattgacttgacaatacatttgtttttctttatctaagaagaaactagggataaggagacaaattggaactcagctttgttatccnnnnnnnnnnnnnnnnnnnnnnnnnnnnnnnnnnnnnnnnnnnatgtatacaacattctgtctccacgtatgcctacacgccagaagagggccccaggtctcattatggatggttgtgagccaccatgtggttgctgggaattaaattcaagacctctggaagag

SEQ ID NO: 3461 - DNA, 174 bp, Cricetulus griseus
  misc_feature (134)..(134): n is a, c, g, or t
cgagttggagcctgaagcccctgcgggtgatggtgataagaaaggcaatgcagagggtagcagtgatgaggaagggaaactggtcatcgacgagccagccaaggagaagaatgagaaggggatgctgaagaggnagaatgcaggggacattgctggagggactcccctaacgtc

SEQ ID NO: 3462 - DNA, 579 bp, Cricetulus griseus
caccctgaccattctagcagagaactctccaagattcttgcaaagctggagcgcttaaaacaacaaaatgaagacttgaggagaatggctgagtctctccgaataccagaaggccctattgatcaggggacagctacaggaagagtccgtgttttagaagaacagcttgttaaggccaaagaacagattgaaaattacaagaaacaagctaggaatgatctgggaaaggatcatgaaatcttaaggaggaggattgaaaatggagctaaagagctctggttttttctacaaagtgaattgaagaaattaaagaaattagaaggaaacgaactccaaagacatgcagatgaaattcttttggatttaggacatcatgaaaggtctatcatgacagatctatactacctcagtcaaacagatggagcaggtgagtggcgggaaaaagaagccaaagatctgacagagctggtccagcggagaataacatatctgcagaatcccaaggactgcagcaaagccagaaagctggtatgtaatatcaacaaaagctgtggctatggatgtcaactccatcatgtg

SEQ ID NO: 3463 - DNA, 579 bp, Cricetulus griseus
gatttcctttcagcctacagagaccccaggactggagaagagctcatcagaaatgagtactatgttactagagcttcagagcctgtgttctctgctgcaggagtctaaagaagaagccattggggccctgcagagaaaaatctgtgaattgcagactagactgcaggaccaagaggaagagcatcaggaagccctgaaggcaaaggaggcagacatagagaagctgaaccaggccttgtgcttatgctataagaatgaaaaggagctccaggaagtgatacagaagcagaacgagaagatcttagggcagatagacaagagtggtgagctcataagtctcaaggaggaggtgacccagctcacacgtttactgcggcatgcagagacagagacgaaagtgctccaggaagctctggagggccagctagaccccagctgtcagctgatggctactaactggatccaggaaaaagtctctctctcacaggaggtggacaagctgagggccatgttcctggagatgaaaaacgagaaagcaaaactggtgatcaagtatcagagccataggaacattcttga

SEQ ID NO: 3464 - DNA, 579 bp, Cricetulus griseus
ggaggcggaggcccggtgcgttcaagattcggcctcgcccgtagtccaccgccatggccgaggaaggcattgctgctggaggtgtaatggacgtcaacaccgcgcttcaggaggtgctgaagaccgccctcatccacgatggcctggcgcgcggcatccgcgaggccgccaaagccctagacaagtacgtgtctcggtctcagtgctgtgggttgctgcagccggagagggaaggaggcgtgaagttcatgctgttagcacaaaagttctgagtggcagccgttcagcaggaaacctaggaaaaggcgccaagcccatctctgtgtgctcgcatccaattgtgatgagcccatgtatgtcaagttggtggaggccctttgtgctgaacaccagatcaatctaattaaggttgatgacaacaagaaactaggggaatgggtaggcctctgtaaaattgatcgagaggggaagccacggaaagtggttggctgcagttgtgtagtggttaaggactatggcaaagaatctcaggccaaggatgtcatcgaagagtacttcaagtgcaagatatgaataaat

SEQ ID NO: 3465 - DNA, 503 bp, Cricetulus griseus
ggcacaagtctattgtgtctttccgccagctccgtgaggaggttctaggagagctatcaaatgtggagcaagcagctggtgtccgttggagtcgtttcccatacctcaatcgtctgctgaaggggcatcggaagggcgagctgacagtctttacaggacctacaggcagtggaaagacaacattcatcagtgagtatgccctggatttatgtacccaaggggtgaacacactgtggggtagctttgagatcagcaatgtgagactagcccgggtcatgctgactcagtttgctgtgacacggctggaagagcaactggacaagtatgaagagtgggcagatcgctttgaggacctgcctctctatttcatgactttccatggacaacagagtatcaggtctgtaatagacacaatgcaacatgctgtctacgtctatgacgtctgtcatgtagtcattgacaacttgcagttcatgatgggtcatgaacagttctctaccgac

SEQ ID NO: 3466 - DNA, 493 bp, Cricetulus griseus
aaggagctgagccgggagggcgcggtgtgcggtgaggctgacagcggtctccgttagatcgagtgatggcgcagcagctcgcccgagagcaaggcatcaccctgcgcgggagcgcggagatcgtggccgagtgggtttcgtttggcgtcaacagcattttgtatcagcgtggcatatacccgtcggaaacctttactcgagtgcagaaatacggactcaccttgcttgtaactactgaccccgagctcataaagtatctcaataatgtggtcgaacagctgaaagagtggctctacaagtgctctgttcagaagctggtggtggtcatctcaaatattgaaagtggtgaggtccttgaaagatggcagtttgatattgagtgtgacaagactgcaaaagaagatggtgtttgtggagaaaagtcacacaaagccattcaagatgaaatccgttcagtgatcaggcaaatcacagctaccgtgacctttctgcc

SEQ ID NO: 3467 - DNA, 581 bp, Cricetulus griseus
  misc_feature (120)..(142): n is a, c, g, or t
gtatatgaaatcctgcccaccttcgatgttctacatttcaagtctgaaggctacaacgacttgagcctctacaacctctttctggaagagaacataagtgagctcaaatcatacaagtgnnnnnnnnnnnnnnnnnnnnnnnaaagcgagggggcagggcatcgaccccatgctgctcctgaccaacctaggcatgatcaagatggacgtcatggatgggaagactcccatgtgctcagagatcaagggagaggaccagggcagccagatggtggagttcaaagatttggacctgagcagtgacactacaacaaacattggagagaagaactctcgacagagacttctgaattcatcatgctaatggtttcattcttgactttcaagtccgtgacttctgcggctgaagcacccctgttgggtctgtagctagtttgcagaaaatgttcttggtagtgatgtgatgtgtgttttaccaggccctaatagatataatggccaatagtgtacaggaagaatggattatgaatgtcccataagacaaaatattgaaatgagtaagtgggccttggcccgaagcc

SEQ ID NO: 3468 - DNA, 309 bp, Cricetulus griseus
  misc_feature (5)..(5): n is a, c, g, or t
  misc_feature (7)..(27): n is a, c, g, or t
  misc_feature (46)..(64): n is a, c, g, or t
  misc_feature (72)..(72): n is a, c, g, or t
  misc_feature (82)..(82): n is a, c, g, or t
  misc_feature (88)..(88): n is a, c, g, or t
cactntnnnnnnnnnnnnnnnnnnnnntcccccccttcgtagtcgnnnnnnnnnnnnnnnnnnntggtcggnacagccgggnacccanccagcgaccagtatgaagcactggcaaggtaacagcggtccttgcagaaacccgatgtcctgaccaccggtaggcgggtaacccaatagggagcataaacttaatatcatgactgctgggtcccgaggtaccccttctggttcaggatgtggttttcactgatgagatggcacattttgacagagtagcgaattcccgagagagtggtacatgcaaaagga

SEQ ID NO: 3469 - DNA, 579 bp, Cricetulus griseus
tgggtgcagcgtagcatctgggagaatggagacagcctggaagagctcatggaagaggttcaaaccttgtactactcagctgatcacaagctgcttgatgggaacccactagatggacaggctgaggtgtttggcagtgatgatgaccacattcagtttgtgcagaaaaagccaccccgtgagaatggccataagcagataagtggcagttccactggatgtctctcttctccaaatgcttcaatgcaaagtcctaagcatgagtggaaaatcgttgcttcagaaaagacttcaaataacacttacttatgcctggctgtgctggatggtacattttgtgtcattttcctccatgggcggaacagtccacagagctcgccaacaagtactccaaaactgagcaagagtttaagctttgagatgcagccagatgagctcctataaaagcccatgtctcccatgcagtatgcacggtctgggctagggacagcagagatgaatggcaaactcatagctgcaggtggttataacagagaggaatgtcttcgaacagttgaatgctatgatccacgtacagat

SEQ ID NO: 3470 - DNA, 497 bp, Cricetulus griseus
  misc_feature (39)..(51): n is a, c, g, or t
  misc_feature (53)..(77): n is a, c, g, or t
cgcacgaagatgcttcagacacagaaaatgccattgagnnnnnnnnnnnnngnnnnnnnnnnnnnnnnnnnnnnnnncttggaagttaaggaagaaaatggtgttttggtcttaaatgatgcaaactttgataactttgttgctgacaaagatacagtgctactggagttctatgcaccatggtgtggacattgcaagcagtttgctccagaatatgagaaaattgccagcactttgaaggataatgaccctcccattgctgttgctaagattgatgcaacctcagcatccatgctggccagtagatttgatgtgagtggttatcccaccatcaagatcctgaagaagggacaggctgttgactatgatggctccaggacccatgaagaaattgttgccaaagtcagagaagtttcccagcctgactggacacctccacctgaagtcacgcttctattgactaaagataactttgatgatgttgtgaataatgcaga

SEQ ID NO: 3471 - DNA, 520 bp, Cricetulus griseus
  misc_feature (10)..(54): n is a, c, g, or t
  misc_feature (379)..(379): n is a, c, g, or t
gttaattgcnnnnnnnnnnnnnnnnnnnnnnnnnnnnnnnnnnnnnnnnnnnnnttatacgctcaaattaacaacacatcccttgcggagttggaaaagcggttaaaagagacaccgtttgaccctcctaaagttgaaagtgcagaaagctttccaagctatgacacagcttctgagcagctgcatgaggcagggtatgatgcttacatcacaggactctgcttcatctccatggcaaattacctaagttctttactcggacctccaaaagtgtgtgtgtctgccagatcaaaactcattgaacccttttttaacaagttatttcttatgagggtcatggacattccatatttaaacttggaagggccagagcttacancctaaacgtgatcatgttctccacgtgacattccccaaagaatggaaaaccagggacctttaccagctcttcagcgcctttggtaacatccaaatatcctggattgatgacacatcaccctttgtttctctcagccagcca

SEQ ID NO: 3472 - DNA, 580 bp, Cricetulus griseus
ttatctggttctccgagctctggacaccgtggaagatgacatgagcatcagtgtggagaagaagatcccgatgctgcgcaactttcacactttcctctatgaacccgagtggcggttcacggagagcacacagaaggaccggcaagtgctggaggacttccccacgatctccttggagtttagaaatctggctgagaaatatcaaacagtgattgctgacatctgccagaaaatgggatgtgggatggcagaatttgtggacaagcatgtgacctccaaacaggactgggacaagtattgtcactacgttgctggactggtaggaattggcctttctcgtctgttctcgacctcagagtttgaagatcccttagttggtgaagacacagagtgtgccaattcaatgggtctattcctgcagaaaacaaatatcattcgtgattatctggaggaccaacaagaaggaagagcattttggcctcaagaggtgtggggcagatatgttaagaagctggaagactttgctaagccagaaaacatatatgtggccgtgcagggcttgaatgaactcataaccaac

SEQ ID NO: 3473 - DNA, 577 bp, Cricetulus griseus
tcggggctgggctttaatggctttgaagaaaatgggaaggcaaaatgggacgcgtgtgccaacatgaaagtgtggctctttgaaacaactcctcgattcaacggcaccatcgcctccttcaacatcaacaccaatgcctgggtagcccgttacatcttcaaacgcctcaagtttcttggaaataaagaactctcacaaggcctctccttactgttcttggccctctggcacggcctacactcaagatacctgatttgcttccagatggaattcctcattgttattgtggaaaagcaggtcaccagcctaatccaggagagccccaccctgagcagcctggcctccgtcactgccctgcagcccttctactacttggtgcagcagaccatccactggcttttcatgggttactccatgactgccttctgtctcttcacatgggacaaatggcttaaggtatacatgtctgtctacttccttggacatgtcttcttcttgagcctactattcatattgccttacattcacaaagcaatggtgccaagaaaagagaagttaaaaaaaagggaataataga

SEQ ID NO: 3474 - DNA, 579 bp, Cricetulus griseus
  misc_feature (408)..(444): n is a, c, g, or t
  misc_feature (482)..(515): n is a, c, g, or t
cattggaaaataattttaatcccagtataaacagggatgttggacaaagtgccaagaataatattgtaaagaataagagtttaccattttcccagtgtgaaagtccatccctagctgagttgtgtgaggagcacagagtaaacagtcccagccagtgctttactttgtccgatctgtataaccagtcatctgctaacttgggttcccttcccctgtcagaactggcaaaccgctctcagtcttctaatgcagtatcagagttaacaggatctctgtcatctttggcattttctgaagcttctcccacaagatacctggagaatttgtccctttcagatttgattgcataaacgattgaactagataactctcacattaagagagatgcctttgagctcagtttatctnnnnnnnnnnnnnnnnnnnnnnnnnnnnnnnnnnnnntcactgtcctgataaaaactccagagtttgttccaaannnnnnnnnnnnnnnnnnnnnnnnnnnnnnnnnngatactatcgttctaacctcaaagctaaggaaaaattgcagtccctactagggtagctagtaaa

SEQ ID NO: 3475 - DNA, 224 bp, Cricetulus griseus
ccctcattcccacccctcggctccacttcctcatgactggctatacccctctcaccacggaccagtcagtggccagtgtgaggaagacaaccgtcttggatgtcatgaggcgactgctacagcccaagaacgtgatggtgtccacaggccgggaccgtcagaccaaccactgctacatcgccatcctcaacatcatccagggggaggtggaccccacccaggtc

SEQ ID NO: 3476 - DNA, 581 bp, Cricetulus griseus
  misc_feature (309)..(309): n is a, c, g, or t
  misc_feature (448)..(448): n is a, c, g, or t
  misc_feature (508)..(508): n is a, c, g, or t
  misc_feature (524)..(524): n is a, c, g, or t
acatgtgagtgcactgacacagacacaggctgtggagggggagattgaactagccaagatgaagaagttcattgcttactgccgagcgaggtgtggccctcggctgtctgcaaaggcagcagagaaactgaagaaccgctatatcatcatgcggagtggggcccgtcagcacgagagggacagtgatcgccgttccagcatccccatcacagtgcggcagctggaggctattgtgcgcattgctgaggcccttagtaagatgaaactgcaaccctttgccaccgaggctgatgtggaggaggcactcangttattccaggtgtgcacactggatgctgctttgtctggcaatctgtcaggggcggagggcttcactacccatgaggaccaagagatgctgagccgtatcgagaagcaactcaagcgccgctttgccattggctcccangtgtctgaacacagcattgttcatgacttcaccaagcagaagtatccagagcatgccatnccgaaaggtgctgcanctcatgctgcgcaggggagaggtccaacaccgcatgcagcgcaaggtgctctaccgg

SEQ ID NO: 3477 - DNA, 334 bp, Cricetulus griseus
atccacagggatcgaggagggacacctggccgtgtactacaggggcggagccttactaactagccccagtggaccaggctatcatatcatgttgcctttcattactacgttcagatctgtgcagacaacactacaaaccgatgaagttaaaaatgtgccttgtggaacaagtggtggagtcatgatctatattgaccgaatagaagtggttaatatgttggctccttatgcagtgtttgacattgtgaggaactacactgcagattatgacaagactttaatcttcaataagatccaccatgagctgaaccagttttgcagtgcccacacactt

SEQ ID NO: 3478 - DNA, 600 bp, Cricetulus griseus
  misc_feature (27)..(65): n is a, c, g, or t
  misc_feature (403)..(419): n is a, c, g, or t
cactgagggcaatagtgctcccctaannnnnnnnnnnnnnnnnnnnnnnnnnnnnnnnnnnnnnntcgggtcgacccacgcgtgcgctcaaatatttcgcaatggaatgatgatgaagagagaatacaggggccagcgatcagtgaaagcgctcgcagactacatcaggcaacagaaaagtaacccagttcaagagattcaaagtatagatgaagtcaccactcttgatcgcagtaagagacatatcattggatactttgagcagaaggattcagataattacagagtttttgaaagagtagcaagtattttgcatgatgactgtgccttcctttctgcttttggagatgtttcaaaaccagaaaggtacagtggagacaatttaatctacaaaccaccaggnnnnnnnnnnnnnnnnntggtatacttgggatctatgacaaattttgatgtaacttacaactggattcaagacaaatgtgtccctctggtccgagaaataacatttgaaaatggagaggaattgacagaagaaggactgccttttctcatactcttccacatgaaagaggatacagaaagtttagaaacattccagaa

SEQ ID NO: 3479 - DNA, 494 bp, Cricetulus griseus
  misc_feature (373)..(393): n is a, c, g, or t
ccagccataaacattttgcaagaacagcctgactctaaaggtcccagcattcctttctcgatttttgatgagtttctttcagacgaaaaggacaaaagtcctgctgcagattctccacaggctctcaaagcccagcgaagaccccttgcagttctcaaaactgcagaaatcattgcctcaaatgaggacatgtctcctgatgtttgtgatgagcttacaggaattgatcctttgggtgaagatgccaccataccaagtttcaggaacgtaaccattggtcctaaccctgaggacacttgttactttgttagagcgcctcggtttgcatctactcctttccatgagataccgtccttgcagggcatcccttccnnnnnnnnnnnnnnnnnnnnngaagaggatctggatgggaagaccactgaggttcatcacactgcgctggccactatttataaccagaccctcagcatcaagaagctgagcccaattattga

SEQ ID NO: 3480 - DNA, 582 bp, Cricetulus griseus
  misc_feature (3)..(32): n is a, c, g, or t
tcnnnnnnnnnnnnnnnnnnnnnnnnnnnnnntgatgtggtttattgaaactgctagctttattgacgtggatgatgaaagatggcactactttctagtatttgagaagtataataaggatggagctacgctctttgcgaccgtagggtgcgtgacagtctataattactatgtgtacccagacaaaacccggccacgtgtaagtcagatgctgatactgactccatttcaaggtcagggccatggtgctcaacttcttgaaacagttcatagatactacattgcatctccttcagttcttgatataacagctgaagatccatccaaaagctatgtaaaactaagagactttgtgcttgtgaagctttgtcaagatttgccctgtttctcccgggaaagattaatgcaaggattcaatgaagatatggcaatacaagcacaacagaagttcaaaataaataagcaacatgctagacgtgtttatgaaattcttcgactgctggtaactgacatgagtgatgctgaacaatacagaagctacagactggacattaaaagaagactaattagcccttataagaa

SEQ ID NO: 3481 - DNA, 578 bp, Cricetulus griseus
  misc_feature (546)..(546): n is a, c, g, or t
tttggcctggaagcttttgcttgcatgggacatacctaccaagatgggtctgctcgtgcagaagtgtcccaggcctgcaacttcctcctgtcccagcagcatggcagatggaggctggggggaggactttgagtcttgtgagcagcggcgttatgtgcagagtgccaagtcccaggtccataatacgtgctgggccctgatgggcttgatggctgtcaggcatcccgacatcactgctcaagagagaggaatcagatgtctgttggagaagcagctctccaatggagactggcctcaggagaacatctctggggtcttcaacaagtcctgcgccatcagctacacaagttacaggaacatcttccccatctgggccctgggtcgcttctccaacctgtaccctgacaattccctcgctggccacctttgaatgcacatgcgtcagcctggatcatacagatccaggcaaggctgggggttcttggctagccctgccctatgccttgttctctatttctgtaaacatgaagctggggatagggtcanggttggtgtctttatgcacttggcagtgtaag

SEQ ID NO: 3482 - DNA, 327 bp, Cricetulus griseus
  misc_feature (97)..(138): n is a, c, g, or t
gtctacccacgcgtggggttggcccacttagggaagccctaactcacattgatcacagcttgagtcggcaacactgtccgttcctggttggggacannnnnnnnnnnnnnnnnnnnnnnnnnnnnnnnnnnnnnnnnncgttactgcatgacccaacttacctggcgggggaattgggtgccctgcagagctggttccagacactgagtacccaagagccatgtcagatagctgcagagactgtgctgaaacagcacggtgtcctggctctgcgcccctacctccaaaaacatccccagccccgccctcctgaggggagagctgcca

SEQ ID NO: 3483 - DNA, 581 bp, Cricetulus griseus
tcaaggaagatgtgtacccgaaaccacagcatcttcctggcagatataaatcaagagaggtgtgtcaatgagacctacaagaagaacctgatggccctcaacaagtttgtgatggtgaaattccttaacgattccattgtggatcctgtagactctgagtggtttggattttacagaagtggccaagctaaggaaaccattcccctccaggagagcactctatacacagaggaccgcctggggctaaagcaaatggacaaagcaggaaagctagtatttctggctaaggaaggggaccatcttcaactgtctaaagaatggtttaatgcctacatcataccttttcttaaatgaagcccttgcactttgcagcagagctcaagaaaccccagctcttccaaaaaaacacatcaacagctctccatgcccaaccctcaactctaatctagcttgcaagcagttctccactcctgttatctaacatgccctacttggaaagatctaagatctgaatcttatcctttgctgcctcctatcaccatatggtgttgaattcaaatttaattagctaataaccatgg

SEQ ID NO: 3484 - DNA, 578 bp, Cricetulus griseus
  misc_feature (377)..(377): n is a, c, g, or t
  misc_feature (577)..(577): n is a, c, g, or t
tgattatgaagttattcctaacagtaacttctatgtatctagaacagcctacagagataacacttctgtctattatataagtgggaagaagaggacatttaaagatgttggaaatcttcttagaagccatggaattgacttggaccataatcgatttttaatattgcagggtgaagtcgaacagattgctatgatgaaaccaaaaggccagactgaacatgatgagggtatgcttgagtatttagaagatataattggctgtggacggctaaatgaacctattaaagtcttatgtcggagagttgaactattaaatgaaaacagaggagaaaagttaaacagagttaaaatggtggaaaaggaaaaggatgccctanaaggagagaaaaacatagccattgagttccttaccctggaaaatgaaatatttaaaaaaaagaatcatgtctgtcaatattacatttatgatctacaaaaaagaattgctgaaatgaaaactcaaaaggaaaaaattcatgaagatactaaagaaatcactgagaagagcaatatgctttcaaatgaaatgaaagctaana

SEQ ID NO: 3485 - DNA, 578 bp, Cricetulus griseus
  misc_feature (537)..(537): n is a, c, g, or t
  misc_feature (576)..(576): n is a, c, g, or t
gaaatgtgtccctaaagtgcctcactgagattgctggtgtgagtgtaagccaatacgaggaacaatttgaaactctgtttacacttacaatgatgcagctaaagcagatgcttcctttaaatactaatattcgagttgcatactcaaatggaaaagatgatgaacagaactttattcaaaatctcagtctatttctctgcacctttctaaaggaacatggtcaacttttagaaaaaagactgaatctcaaggaagcactcatggaggctcttcattatatgttgttggtgtctgaggtcgaagaaactgaaatttttaaaatctgtcttgagtactggaatcatttggcagccgagctctatagagagagtccattttctacatctgcttctccattgttatctggaagtcagcattttgatattcctccaaggagacagctgtacctaactgtgttatcaaaggtccgtttattgatggttagtcgcatggctaaaccagaggaggtactggttgtagaaaatgatcagggagaangtgtaagagagttcatgaaggataccgattccataaatntg

SEQ ID NO: 3486 - DNA, 555 bp, Cricetulus griseus
gaaacttcaaaatcaagtgaatggtacagaatggtcatgagaaaaatttgaatacattgtgttgggcaataggctccattagtggtgcaatgcatgaagaagatgagaagcggtttcttgttactgttattaaggatcttttaggattatgtgagcagaaaagaggcaaagataataaagctataattgcatcgaatatcatgtacatagtaggtcaatacccaaggtttttgagagcacactggaaatttttgaagacagtagtaaacaagctgtttgaattcatgcatgagacccatgatggagtccaggacatggcttgtgacacattcattaaaatagcccaaaaatgccgcagacactttgtgcaggttcaagttggagaagtgatgccatttattgatgagattttaaacaacataaatactataatttgtgatcttcaacctcagcaggttcatacattttacgaagctgtgggatatatgataggtgcacagactgaccagacagttcaagagcatttgatagaaaaatacatgctacttcctaatc

SEQ ID NO: 3487 - DNA, 533 bp, Cricetulus griseus
  misc_feature (454)..(479): n is a, c, g, or t
atgcatcgttcggagtcagcgcgggccgctcgcatccccgggcgctggcagccgaggagatccgacagatgctggagggcaagccgctggcagacaagatgcgccccgacacgctgcaggactacatcgggcagagtagggccgtggggcaggagactctgctccgctcgctgctggagaccaacgagatcccttcggtcatcctgtggggcccgccaggctgcggcaagaccactttggctcacatcatagccaacaacagcaagaagcacagcataaggtttgtgacattgtctgcaacaaatgccaagaccaatgacgtgcgagatgtcataaagcaggctcagaatgaaaagagctttttcaaaaggaaaaccatcctttttattgatgagattcatcggttcaataaatctcagcaggacactttccttcctcacgtggaatgtgggannnnnnnnnnnnnnnnnnnnnnnnnngagaacccttccttccaggtcaatgctgctcttctaagccgatgtcgggtgatt

SEQ ID NO: 3488 - DNA, 579 bp, Cricetulus griseus
cggtggcgactgagaagaaaccatgcaggcatttctaaaaggcacatctgtcagcactaaaccacaattcaccaaggaccgggcaatacctacaggaagcagtggagaaaccaagaaagtcaagccagttccttgggtggaaaaatagtaagaattatccatatttttgttgaaataactaagtttcctccctaatcttttatagtccactggatttttgttttgttttaatgtaagggagatttgtggtatttagatgctactacctttggggggtacagtttgggggggtcttagatacagaaatgaaaacgtttctgtgagctggttataaatagtagtcctattgaaatctagattctggccctcttttattattgtatactggaaattgttggggttttgtttggttttagtatataaaaggtttgaagtagcactaaattgtcagctaagtgatactagacgtaattgtaaccattagctagatgtattctctgattatcgagggttttcaggttatttacaagccaaacaaggtcctaataaatgacttatgataaaagttactagctggca

SEQ ID NO: 3489 - DNA, 507 bp, Cricetulus griseus
tcttgacatgggctttgaagcaagcataaacacaatcctggagtttttgccaaagcagaggagaacaggccttttctcagccacgcagacacaggaagtggagaacttggtgagagcaggcctccggaaccctgtccgaatctctgtgaaggagaagggcgtggcagccaatagcacccagaagacaccatcccgcctggagaaccactacatgatatgtaaggcagatgagaaattcaatcagctggtccatttcctccggaaccatcagcaggagaagcacctggttttcttcagcacatgtgcatgtgtggaatactatggaaaggccctagaggtgctgttgaagagagtgaagaccctgtgcatccatggaaagatgaaatacaagcgcaataagatcttcatggagttccgaaagcttcagagtgggatcttggtgtgcactgacgtgatggcccgggggattgatattcctgaagtaaactgggtgttacagtacgaccc

SEQ ID NO: 3490 - DNA, 478 bp, Cricetulus griseus
  misc_feature (320)..(334): n is a, c, g, or t
gtcattttaataagctataatttttgaagaacttccttttttattagtttagaaagccccttatttttcacagaggggattttgtacacataaatgagttatttgtgctactttgacaaaaataatttttgtatgttgaaatgtttgtgcaccttcagtataaggtgtcatgtgcatctagccaatcagttaacagcagagcattcctgaggcttcttagtactgagtataattcaagagtccagggacatggcatccaaagggcatataaaagtctagattcatatttgaaccgtataatgtatttttctcttagtatnnnnnnnnnnnnnnnagtgtctcctaaggtaaccagatactgtataggcgggaaggaagggaaaggcaaagggaagtgaggcaggatgggaaggaggggtctagtctgatgatgatagtgtacatccacagtgtgatacgtagtgtgagttactgaaaa

SEQ ID NO: 3491 - DNA, 484 bp, Cricetulus griseus
atttggagcatcaactccactgtgctacagcagtgctgagatggttgcgatcctgctgctcctctgtcttcccttcatcttctgcctggccacaccaagaatcaggaaaatgctgtcttgtgggatgtgtacatctaatgtccagcttcctgggaaggtagccatagtcaccggtgctaacacaggcattgggaaggagactgctaaagacctggcccaaagaggagcccgtgtgtatttagcttgccgggatgtgcagaaaggggaacaggtggctagcgagatccaagccaccacagggaataatcaggtcttggtaaggaaactggacctagctgataccaagtctattcgagcctttgccaaagacttcttagctgaggaaaagcacctccacatcctaatcaacaatgcaggagtgatgatgtgcccctactccaagactgcagatggctttgagatgcacattggagtcaaccacttg

SEQ ID NO: 3492 - DNA, 523 bp, Cricetulus griseus
agctctgcagatctctgatgtggtcatggcctccctgttgcggatgttccaaagcacagctgggtctgggggagtgcaggaagatgccctgatggcagttagcacgctggtggaagtattgggtggtgaattcctcaagtacatggaggcctttaaaccattcctgggcattggattgaaaaattatgctgagtaccaggtgtgtttggcagctgttggcttatttggagacttgtgccgagccctgcagtctaacattttacctttctgtgatgaagtcatgcagctgctcctggagaacttggggaatgagaatgtccacaggtctgtgaagccacagattctgtctgtgtttggtgatattgctcttgccattggtggagagtttaaaaaatacctagaggtcgtattgaatactctgcagcaggcctcccaagcccaggtggacaagtcagactttgacatggtggattatctgaacgagttaagagaaagctgcttggaagcttatacaggaatcgtc

SEQ ID NO: 3493 - DNA, 528 bp, Cricetulus griseus
ggtacgtccacaggacactgtgtcagtaattggtggagtagctggaggcagcaagcaagggaggaaagctgcttggaaattcataaaggacaactgggaagagctttataatcgataccagggagggttcttaatatccagactaataaagctttctgttgagggttttgcgcttgataaaatggctggagaagttaaggctttcttcgagagtcatccagctccttcagctgagaggaccatccagcagtgttgtgaaaatatcttgctgaatgctgcttggctaaagcgagatgctgataacattcaagagtacctcctccagcggagagcctcccaaccctcagtgtgaagcctccgcccacctgcccacaccaagggcttgctgcctttctgcagggatgaggaggagctacccaacagctgattcacatgccaagaattggagtcttataccagtgggggttggacaatgaatgtagttaactggttcctgctcacactccagaattaaattctattgaaaaa

SEQ ID NO: 3494 - DNA, 561 bp, Cricetulus griseus
gcccaagcatactgagagccggcatggccgacaatcctgtgttggagctgttgttgcggcgactggaggcagcggatggcggcctggacagcgcggagttggctacgcagctgggcgtggagcaccaggtggtggtgggcgcagtgaagagcctgcaggctctgggtgaggtcattgaggctgagcttcgttccaccaagtgctgggagctgactactgagggtgaggagattgcccgggagggcagccatgaggcccgtgtgtttagaagcatccctctcgagggcctggtgcagagtgagctcatgcgactgcccagtggcaaggtgggcttcagcaaagccatgtccaacaagtggatccgagtggacaagaatacagctgatgggccccgggtgttccaagtggtggacagtatagaggatgaagtacagaggcggttgcagctggtccatgcaggccaggctgagaagctggctgaaaaggaaaggaatgagctccggaagaggaagctgctaactgaagtgaccctgaaaacctactgggtgagcaagggcaagg

SEQ ID NO: 3495 - DNA, 350 bp, Cricetulus griseus
tgtcactcgtgtctctgaagtcaaacctcggatggtggtggccacatatacttgtgatcagtgtggggcagagacttaccagccgatccagtctcccaccttcatgcctttgataatgtgtcccagccaggagtgccaaaccaaccgctcaggagggcggctttacctgcagactcgtggttccaaatttattaaattccaagaaatgaagattcaagaacatagtgatcaagttcctgtgggaaacatccctcgtagcatcacagtggttttacaaggagagaatacaaggactgccctgcctggtgaccatgtcagtgtcactggtatcttcttgccagtcctgcgta

SEQ ID NO: 3496 - DNA, 578 bp, Cricetulus griseus
cacgcagaggcggagtagagtttgtcccccactcacgcacgtggtgcccgagtctctcttctcgtcgcttgctgtgaagatgtcgcacccatccccgacagccaggccctccaaccccaagaacccgcgggtcttctttgacgtggacatcggcggggagcgagttggcagaattgttttagaattgtttgcagatattgttcccaaaactgcagaaaattttcgtgcgttgtgtacaggagaaaaaggcactggacccacaactgggaaacctctccattttaaaggatgtccttttcaccgaattattaagaagtttatgattcagggtggagacttctcaaatcagaatgggacaggtggagaaagtatttatggtgaaaaatttgaagatgaaaattttcattataagcatgatcgggagggtttgctgagcatggcaaatgcacgtcccaatacaaatggtgctcagttctttatcacaacagttccaactcctcatttggatggaaaacatgtggtatttggtcaagtaattaaaggactaagtgtagcaaggatgcttgaaaatgtcgaag

SEQ ID NO: 3497 - DNA, 561 bp, Cricetulus griseus
  misc_feature (506)..(506): n is a, c, g, or t
aagccgttgattttaggccgttctttcggccgagagtccccgcagcgatggcgagtcagtcgcaaggcatccagcagctgctgcaggccgagaagcgggcggccgagaaggtgtccgaggcccgcaagcggaagaaccggaggctgaagcaagccaaggaagaagcccaggctgagattgaacagtaccgcctgcagagagagaaggagttcaaggccaaggcagctgcggcactggggtcccacggcagttgtagcagtgaggtggagaaggagacccaggagaagatgaccgttctccagcactatttcgagcagaacagggatgaagtcctggataacctcctggcctttgtgtgtgacattcgtccagaaatccatgaaaactaccgaataaatggataggatgtggaagcacctgccctgtgggttggcatgggagatgccctcacagaataggaaacatccacagaactcgagttctgttctggaaggcattaaattatntctctatgctgttgtagattccttcactttttgagagtatcaaatctaacttttt

SEQ ID NO: 3498 - DNA, 402 bp, Cricetulus griseus
ggccggcttggtcactatggaggagataggcattttggtggagaaggttcaagatgagatcccagcactgtctgtgtctcggccccagaccggcctgtcctttctggggcctgaacctgaggacctggaggacctgtacagccgcgacaagaaactgcagcaagagctggagttcctggaggtccaggaggagtatatcaaagatgagcagaagaatctgaagaaagaattcctccatgcacaggaggaagtgaagcgaatccagagcattccattggtcattggtcagtttttggaggctgtggatcaaaacacagccattgtgggctctaccacaggttctaactattacgtgcgcatcctaagtaccattgaccgggaactgctcaagcccaatgcctc

SEQ ID NO: 3499 - DNA, 579 bp, Cricetulus griseus
  misc_feature (143)..(211): n is a, c, g, or t
tgggcatgttctaccgcaccatccgcatgatggagaatggcatcaagcctgtgtatgtctttgacggcaagccaccacagctgaagtcaggcgagctggccaaacgcagtgagaggcgagctgaagctgaaaagcagctgcannnnnnnnnnnnnnnnnnnnnnnnnnnnnnnnnnnnnnnnnnnnnnnnnnnnnnnnnnnnnnnnnnnnngcaacacaatgatgagtgcaaacacctgctgagtctcatgggcatcccgtaccttgacgcacccagtgaggcagaggccagctgcgctgccctggtgaaggctggcaaagtttatgccgcagccaccgaggacatggactgcctcacttttggcagccctgtactaatgcgacatctgactgccagtgaggccaagaagctgcccatccaagagttccacctgagccgcgtcctgcaggagctgggtctgaaccaggagcagtttgtagatctctgcatcctgctgggtagtgactactgtgagagtatccggggcatcgggcccaagcgggctgtggacctcatccagaagcataagagcatcgagg

SEQ ID NO: 3500 - DNA, 382 bp, Cricetulus griseus
agcgagcgcccgtagcctccccgcccctcctgcaacgcacgaccccgggatcccccaacccctcccggctcgcccgccgccatggctgacaaggaagctgcctttgacgacgcggtggaagagcgtgtgatcaatgaggaatacaaaatatggaagaagaataccccttttctttatgatttggtgatgacccatgccctggagtggcccagtttaactgcccagtggcttccaaatgtaaccaggcctgaaggaaaagacttcagcattcaccggcttgtcctgggaacacatacgtcagatgaacaaaaccacctggtgatagccagtgtccagcttccgaacgatgatgctcagtttgacgcatctcactatgacagtg

SEQ ID NO: 3501 - DNA, 537 bp, Cricetulus griseus
gaaggcagcttttctttttctgaggaaaaaaataggcatgggctacaggaatatttaaaatgtctcatttacagtataaagttcaaaggtagatgtaattcttacacctttaagtatttgtctgatttctgtctcttcctgaccattgggtatcctttatatgtaaataagataaggtaatcagatagccttattcagtctttatcattttcattcatcagattgttcctgtgtagattggacatttattgtagcactacataactgattttaaatctgtaaatgaattagcactttcatattgaaacaagcctgctagcctatgtataaaagcaaaactgtttgctgtttataaaaagggatataatggggtggggggcaagggtaatttcaggttaattattaatttaaaaatgaactagcaattttgtatctggtgactttgtggtgcactcacctctggtagtgacttgaattcggtatgtaaaaaggggttagtgatgtttcattgctgctaaaaatggcaactccctctgt

SEQ ID NO: 3502 - DNA, 502 bp, Cricetulus griseus
ggccgggcggttgggccgtgaagggagagtcttttcggcgctgaggactggcgctgaggaggcggcggtggctcctggggcgtttgagcgggctcactcgagcccgcgggccgacgcggactcaggcccagccggcggaaccgccccggactccccgcgggcttttctagccgccatggaggacggtgtctacgagcccccagacttgactccggaggagcgcatggagctagagaacatccgacggcgtaagcaggagctgctggtggagatccagcgcctgcgagaggagctgagtgaagctatgagtgaggtggagggtctggaggccaatgagggcagtaagaccttgcagcggaaccggaagatggcaatgggcaggaagaagttcaacatggaccccaagaaggggatccaattcttggtagaacacgaacttctgcagaacacacctgaggaaattgcccgcttcctgtacaagggtgaggggctgaacaagaca

SEQ ID NO: 3503 - DNA, 168 bp, Cricetulus griseus
  misc_feature (93)..(108): n is a, c, g, or t
catgttgaaagtaagcaatcattttgtggttgattacttgaagtgagtaaaaattgtgcctttatctactggtaagttttttttttatttttnnnnnnnnnnnnnnnntaactgaaaaaactatcatttcctgatagtaatattcctctttgttaaaaaaaaaaaaac

SEQ ID NO: 3504 - DNA, 519 bp, Cricetulus griseus
ctcggatccgcttccatccgatcctacagaaactcgtgtggttcctccccgcgacagccaaaatggtgaagctgatcgagagcaaggaagcttttcaggaggccctggcggctgcgggagacaaacttgtagttgtggacttctcagccacatggtgtggaccatgcaaaatgatcaagcccttctttcattccctctgtgaaaaatattccagtgtcgtgttccttgaagtagatgtggatgactgccaggatgttgctgcagagtgtgaagtcaaatgcatgccaaccttccagttttataaaaagggtcaaaaggtgggtgaattctcaggcgctaacaaggaaaagcttgaagcctctattactgagtttgcctaatcatggcctggaaaacataaccagccaccagctgtttaaagcctgtaacttttttaattttcaaaaaaatatgaagtgtggagaacctgtacccaactgccatctgattataaatgacaataaaatattaattctaccc

SEQ ID NO: 3505 - DNA, 524 bp, Cricetulus griseus
tgaaagcggtgtaccgaactgctttggccctgcaggtaggttccctgtgctggcagctggacatccgcgagtgggaggacctgcgagcgatcgcgagggatccttgtctgccaggaggtggaagaacatcctccgcacaggttcaacatttggactcatctgatgacagctcctgactccaagtgactgacatacacctgttgtttcttgggtaacataccaggggctgcgatggacctggttctcaatgttgccgatcactacttctttactccatatgtgtatccagccacgtggccagaggacaacatcgtccgacaaactattagtctcctgattgtcacgaacctgggtgcttatatcctctacttcttctgtgcaaccctgagctattattttgtctatgatcattcattaatgaagcatcctcagtttttatagaatcaagtctctcgagagatcatgttcacggttaagtctttgccctggataacgatccctaccatttcattgttcctgctgga

SEQ ID NO: 3506 - DNA, 579 bp, Cricetulus griseus
tgtgacccatgaagacttccaagttacagaggaagtgaaggccctgaccgcggagattgtgaagaccattcgggatatcattgccctgaaccctctgtacagagagtcggtgttgcagatgatgcaggcaggccagcgggtagtggacaaccccatctacctgagtgacatgggcgctgcactcacgggggctgagtcccatgagctgcaggatgtgctggaagagaccaatatacttaagcggctctacaaggccctatcactcttgaagaaggagtttgagttgagcaagcttcagcaacgcctgggccgagaggtagaagagaagatcaagcagacgcacaggaagtacctgctgcaggaacagcttaagatcatcaagaaggagctgggactggagaaggatgacaaagatgccatcgaggagaaattccgggagcgcctcatggagcttgtggtccctaagcatgtaatggatgtggtggatgaggagctaagcaagcttgcactgctagacaaccactcctctgagttcaatgtcacccgcaactacctggactggctgacatccatcccatg

SEQ ID NO: 3507 - DNA, 507 bp, Cricetulus griseus
  misc_feature (468)..(495): n is a, c, g, or t
atcagatatcagctttgacaagactgatgaatcactggagccaagaactgagacagacaattcaggcacacctcacaataatggaggcatgcgcctacatgactttgtctcaaagacggttataaagcctgaatcttgtgttccctgtggaaagcgcatcaaatttggcaagctgtctctcaaatgtcgagactgccgtttggtctctcatccagaatgtcgggatcgatgtccccttccctgcatttctcccctggtgggaactccagttaagattggagagggaatgttggcagattttgtgtcccagacttctccaatgattcctgctattgttgtcagctgtgtgaatgagatagagcagcgaggcctgactgaggcaggcttatacaggatctcaggctgtgaccgaacagtaaaagagctgaaagagagattcctcaaagtgaaaactgtacccctcctcannnnnnnnnnnnnnnnnnnnnnnnnnnntagcctcctgaa

SEQ ID NO: 3508 - DNA, 509 bp, Cricetulus griseus
ggatacctgtctttcctggtaccatcttccttagtagatcatttatatctcttgcctgatgagcaccttttgacagaggatgaaacaaccatatcagatgatgctgatgtggcccgggatgtcatatgtcttataaaatgcctccggatgattggagagtcagttaccatggatatggcagttttgatggaaaccagttgttacaacttacagtctccagaaaaggctgcagagcaaattttggaagatttgatcactattgatgtagaaaatgtgatggaagacatttgtagtaaactgcaagagatcagaaaccctgtccatgccattggacttcttatacgggaaatggattatgaaacagaagtcgaaatggaaaagggatttgatccagctcaacctttgaatgttcgaatgaatctttcccagctctatggtagtagcacagcagggtatattgcgtgcagaggtgtgtataaaattgccagcactcgtttcctgatctgccg

SEQ ID NO: 3509 - DNA, 476 bp, Cricetulus griseus
cggacgacgtagatcagcaacagactaccaataccgtagaggagcccctggatctcatcaggctcagtttggatgagcgaatttatgtgaagatgagaaacgaccgagagcttcgaggcagattacatgcttatgatcaacatttaaatatgatcctgggagacgtagaagaaactgtgacgacgatagagattgatgaagagacatatgaagagatatataaatcaacaaaacggaacatccccatgctcttcgtccggggagatggtgttgttctagttgcccctccgttgagagtcggctgagacagaaaatggtcctgtgtaggaaaatggagactttgcctcttgagatgtacagaacactcacagagagaagctcatgtgtattctgatagtcagaaatgacccgaggatccctccaccctcaaagaagttcatttgcgagtaacttacaacctctccagctaaaatggc

SEQ ID NO: 3510 - DNA, 557 bp, Cricetulus griseus
cagtgggaggcatccgtgcttctctgtataatgctgtcacaactgaagacgttgagaagctggctgccttcatgaagaattttttggagatgcatcagctgtgaacatgactagctatgctctgcctgtgagcagcacgcagagttcagaataacttctggttggctacaaaaacttaacagacatggatttttttcccccaaacacatgcttgttacagattctttttgaaagaataatgactaaacatccagggctctgcagggcggatgagactaccagcttatgaccaccttcattttgacttgacctggaagcagtttcaaagctttcctgttgcttttctaacgaatccagcctggcatgtctctgcccctgtctctaggtggattgcagtcctagccttggactttgttctgctgattccatttagttattttttgggttcacaggagcataccccaaggaggttggggtaccatgttctggatctgacagcagtgagtttgctgggttctgcagctattggttaaagtcaacagtgactcttaagcatt

SEQ ID NO: 3511 - DNA, 545 bp, Cricetulus griseus
tgccaaaaaagggtcagaactgaatgtaaatgtggggctgagacttgccgaggttacctcaactgaaacttaaagaaatggagcctcatgattgttttgttttgttctaagaactgaaaaagtatttgggatgcctttctatcatcaagattatatgtatatgttaatgtacaacttgtgtctcaaccaaagtacattactattgcttctgaagaggactgcagggccacataaatagaatgtatttggtggttacatactaaatatggaaagtgaactgtttccaaatcaccatacacttagttaagaaatctgaatagacaagtgtcccctttagtgtttgaaaagcaatgaggcaatggctgttactatgacaagcagataattcaatttaggtaaatgtacagattttatttttttttactctattgttcctacttaatactcactgatcttgtatttgagacaaataggcggcactgaatatttttactatattttctacttttgcattaaaacattggcatcttaatgatatatttcag

SEQ ID NO: 3512 - DNA, 445 bp, Cricetulus griseus
tgtgggggagggagaatgtcgcctgttcaccaagatccgaggccagttctcgtcgtggagtaatgagattgaggataatttccaaagtggttatgatgttttatataaagaagtctggaaatttgaaaagcaatatcgaggccgagagctgccagggtttgtgaactacaaaacatttgagaacatcataagacggcaaatcaaagtcctggaagagccagctgtagaaatgctgcacagggttactgaaatggttcgagatgcctttaccattgtttctgaaaaaaattttgatgagttttttaacctccacagaactaccaagtccaaacttgaagacctcagattagaacaagaaatggaagcagagaagatgatccgacttcactttcagatggagcagatcatctactgtcaggaccaagtttacagaggagccttgcag

SEQ ID NO: 3513 - DNA, 492 bp, Cricetulus griseus
  misc_feature (77)..(77): n is a, c, g, or t
tggcttcaaaattccagcacaacacccccaaaaccaataatcccaacggcaaggctgaatctcaaggacaatgggangccgggcctggagaagtggattggttctccctagccagtgtcatttttctgctgctctttgcaccattcattgtgtactacttcatcatggcatgtgaccagtacagctgctcgttgaccacccccatagtggacatagccaccggccgtgctagtctggcagacatctgggccaagacaccgcctgtgacagctaaagctgtccaactgtacaccttgtgggtcagcttccaggtggttctttactcctggcttcctgacttctgccatagatttttgccaggctatgtgggaggtgtccaagaaggtgccgtaactccagcaggggttgtaaacaagtatgaggtgaacgggctacaagcctggctcattactcacctcctctggtttttgaatgcttacctactatcctggt

SEQ ID NO: 3514 - DNA, 560 bp, Cricetulus griseus
  misc_feature (337)..(355): n is a, c, g, or t
  misc_feature (485)..(501): n is a, c, g, or t
ctatatcctcatggagaagattgaacctgagccttttgggaattgcctgctacggcctggcagccctgcccgagtggtccagtgtatctcagaactgggtatttttggagtctatgtcagacagggaacaacacttgtgatgaacaagcatgtggggcatctgcttcggaccaaagccactgaacatgcagatggaggtgtggccgcaagagtggcagtcctggacaacccctaccctgtatgagggcacatcctgcacttcactcaagagaccttctatcccctgtacttgacattcctctcctaattcctgagggctacccctgtctccaccttnnnnnnnnnnnnnnnnnnnatagacctccagggtcttcaaggaagggaaaatcctgggtaccttctctcagccttccatctgaggaccagaagagttatgcttccattagaagagttctggagatccccagatcttggagtgtggggannnnnnnnnnnnnnnnntaaaggccataagccctgcagatcttattaccctcttgtgagcctttccagcaggttct

SEQ ID NO: 3515 - DNA, 452 bp, Cricetulus griseus
gttccagaagattcaggacttgattgacgataaggaagctctggtgtttgtgctgatcgatgaggtggagagtctcacagctgctcgaaatgcttgcagggcaggtgcagagccatcagatgctatccgtgtggtcaatgctgtcttgactcaaattgatcagattaaaaggcgttccaatgtggtgattctcaccacatccaacatcactgagaagattgatgtggcttttgtggacagagctgacatcaagcaatacattgggcccccttctacagcagccatcttcagaatctacctctcttgtttagaagaactgatgaagtgccagatcatatatcctcgtcagcagctgctgaccctccgagagctggaaatgattggcttcattgaaaataacgtgtcaaagctaagcctccttttgagtgaaatttcaaggaagagcgagggcc

SEQ ID NO: 3516 - DNA, 294 bp, Cricetulus griseus
aaactattaactaaatctcaaagagaagccagagccagagctgaagtgacccttaaacacctccaggctcagggggttgaagtgccatcaaaagactcattgccaaagaaaaggcgccggggggagagataaaaagaagaggagaacaccacaacagccagaaaataaagaagtatctgaagctttggaaataagtgttcctgtggaagtcgtggagcaagtaataccagaaaaagaagagatactcccttctgtggaaccagaggaagaagaagaaactgaggacgctggctt

SEQ ID NO: 3517 - DNA, 86 bp, Cricetulus griseus
cctcggcctctggggccttgcggggactcatcccttcggcggcgctaccccaggcgcagctactgctgcgagccgctcccgccgcg

SEQ ID NO: 3518 - DNA, 116 bp, Cricetulus griseus
  misc_feature (34)..(67): n is a, c, g, or t
ttgtcagtgcacaaaatggcgccttacagcctcnnnnnnnnnnnnnnnnnnnnnnnnnnnnnnnnnnggcagtaccatgtggcctctgtcctgtgccaacgggccaaggtggccat

SEQ ID NO: 3519 - DNA, 264 bp, Cricetulus griseus
tgagatactggttgtgggtaagttgttgggggagtactacactggcttggagctggagtgatatgaggtgtatccagcgcgtcagctgtcatgctgacatcaaacataggggtctgtgagtcgacatccattgaaaaaagctctctctggagggggggtgcttccgtctggtgcttggatttgtcaagtggtactcttgatgacttcttcttcttggtcttgttgctccccgagcacatttccatccggggtgatccggaagag

SEQ ID NO: 3520 - DNA, 505 bp, Cricetulus griseus
caaatggcggtgttccgtttttccagcataaaaagccacatggaaaggacaaagaaaacagaggcattaacccagtggagaagtctaaagtggaagagacttcagagtactctgtcacaaaaagcagattgccacttcgagcctcaaatgtgtaattaatctgagggctaaggttttcttttcttaaaaagtaaaacctgaaacttcataatttgaacttttatacagatttcaatgggatagactatgtcaagacatcacagtaactagttgaattgagtcctttttaatcatccttatagtttaagcatgtagtaaatttggtttcatttggaatttatattatgtgtgtttctagcttatataaagtagctcttctgtaatgcgttgttttcttgtatattattaaataccaaatatatggaaattgttcttccaagcttggacttaaatggatgaatgtcatctcccttcctgtcttgctaggcctgagttctgtatgtat

SEQ ID NO: 3521 - DNA, 650 bp, Cricetulus griseus
  misc_feature (1)..(21): n is a, c, g, or t
nnnnnnnnnnnnnnnnnnnnngaggtggccagtctggtcactctccccagtgggcaggggtcactggggcccagctggtgagcagtccttggtaccaactgggacacctcagctcagcctgaggcaaagaggtatagggatatatcgctctcccagctttttttttttttaagtcaaattcaaactaaccagcccagctcagggcctaaaattcacaaaggctaggggccgttttacagtcaccatggatcaccgcacccgtcaaagagggggtttaggccttattcgagtctctgggactcaaatccgaccccccagggtcccgtttccgttccatgttgaccaggaggctagggaaggaaaaaaatgggaacgagagctaccacgtcataggcctgtcatttacggaccctcaaaaagggaggagctacaggataatattatgatttctaagccagcaccttactgggaaggaacagctgtgataaatggagaattcaaggagctgaaactgactgactatcgggggaaatacttatttttcttcttctacccactcgatttcactttggtatgtccaactggaaatattgccttcggtgaccgaattgaagaattcagatctataaatactgaaggggggcatgctt

SEQ ID NO: 3522 - DNA, 651 bp, Cricetulus griseus
  misc_feature (1)..(21): n is a, c, g, or t
  misc_feature (375)..(401): n is a, c, g, or t
nnnnnnnnnnnnnnnnnnnnnactccgctgatgctaacgccaatgggaaagactggggaaggaactggagtgaccgctcaatattctctggcattgggtctactgctgagcccgtttctcagtctaccacttctgattatcagtgggatgttagccgtaatcatccctatatcgatgatgaatggtctgggttaaatggtttgtcttctgctgaccccagctcagactggaacgcaccagcagaggagtgggggaactgggtagatgaagaaagagcttcacttctgaagtcccaggaacccatccctaatgaccaaagggtttcagatgatgataaagaaaagggagagggagctcttgcaactggaaaatccnnnnnnnnnnnnnnnnnnnnnnnnnnngcaaggtgaagacaactctctcacacaggacacagaagagctagaaaaggacattagagaagaacttcccatgaatacctccaaagcccgtccaaaacaggagagagctttttccttgaaaacattaacactattgacccagatgaagcactggtcaaaaatagccagcctatcaagactcttccacctgctattctctaccgagccatctgtcaccttatcacatggtgactctgacaagagctcttcc

SEQ ID NO: 3523 - DNA, 650 bp, Cricetulus griseus
  misc_feature (1)..(21): n is a, c, g, or t
nnnnnnnnnnnnnnnnnnnnntaatgatgaagggaagatgttcatgaggccagggaaactgtccgactactttccaaaaccataccccaaccctgaggctgccagagctgctaacaatggagccttacccccggacctcagctacattgtgcgagctaggcatggtggtgaggactatgtattctccttgctcactggttactgtgagccccccactggggtgtcattgcgagaaggcctctacttcaacccttactttcctggccaggccattggtatggctcctcccatctacaatgaagtcttggagtatgatgatggtaccccagctaccatgtcacaaatagccaaggatgttgccaccttccttcgatgggcatcagagccagagcatgaccatcggaaacgaatggggctcaagatgttgttgataatgggcttgctgctgcccctgacctatgccatgaagcggcataaatggtcagttctgaagagtcgaaagctggcatatcggccacccaagtgaccctgtccagtgtctgcttgtcctcttgcctgaagaagccctcaacagcccaggaagtcctaggccttttcaggcctgctccttttcatccaatagaaggaaatggggtaggagaccaggctct

SEQ ID NO: 3524 - DNA, 864 bp, Cricetulus griseus
  misc_feature (17)..(35): n is a, c, g, or t
  misc_feature (62)..(114): n is a, c, g, or t
  misc_feature (118)..(139): n is a, c, g, or t
  misc_feature (142)..(164): n is a, c, g, or t
  misc_feature (171)..(194): n is a, c, g, or t
  misc_feature (197)..(220): n is a, c, g, or t
  misc_feature (223)..(249): n is a, c, g, or t
  misc_feature (279)..(325): n is a, c, g, or t
  misc_feature (337)..(355): n is a, c, g, or t
  misc_feature (363)..(368): n is a, c, g, or t
  misc_feature (401)..(424): n is a, c, g, or t
  misc_feature (434)..(456): n is a, c, g, or t
aatcctaggctacatannnnnnnnnnnnnnnnnnnacatcgtcggaccatatggcatcttannnnnnnnnnnnnnnnnnnnnnnnnnnnnnnnnnnnnnnnnnnnnnnnnnnnnagcnnnnnnnnnnnnnnnnnnnnnnttnnnnnnnnnnnnnnnnnnnnnnntagcgtnnnnnnnnnnnnnnnnnnnnnnnntannnnnnnnnnnnnnnnnnnnnnnntannnnnnnnnnnnnnnnnnnnnnnnnnncaagcctttctgtatattcaatcttatgannnnnnnnnnnnnnnnnnnnnnnnnnnnnnnnnnnnnnnnnnnnnnnagctgtagcacnnnnnnnnnnnnnnnnnnnaactatannnnnntattttactaaaaaaacctacgtgtaagggggnnnnnnnnnnnnnnnnnnnnnnnngccacacccnnnnnnnnnnnnnnnnnnnnnnngctcctggcactagccataatatgagttaggtttaccttagcatgaaacaaatmgagcycctttgygacctcwctgaargagaatmtgaactagtatytggatttaacgyasagtatgctgsaggcccattmgcrctattcttyatagctgaatatactaacatkaktctaataaatgccctatcaactattgtattcttaggsccrtacaakaatmtcaacacatccagaaatatwkactactaatkttatrcttawgacrctaatattaacctccctattcctatgaattcgagcatcctacccacgcactccgatgtgatcaactcatacacttactatgaaaaaactaactcccattaactttagccctatgtacgtgatatatttctatacctgaattcatag

SEQ ID NO: 3525 - DNA, 907 bp, Cricetulus griseus
  misc_feature (205)..(216): n is a, c, g, or t
  misc_feature (254)..(259): n is a, c, g, or t
  misc_feature (262)..(263): n is a, c, g, or t
  misc_feature (267)..(309): n is a, c, g, or t
  misc_feature (345)..(390): n is a, c, g, or t
  misc_feature (409)..(464): n is a, c, g, or t
  misc_feature (471)..(476): n is a, c, g, or t
  misc_feature (482)..(484): n is a, c, g, or t
  misc_feature (490)..(500): n is a, c, g, or t
  misc_feature (516)..(539): n is a, c, g, or t
  misc_feature (801)..(816): n is a, c, g, or t
gtcgacccacgcgggcrtgcatatcatatagtaaacccaagcccatgacccctcactggagctttctcagccctcttacytacctcaggattagtaatatgatttcactataactcatttactatcctttatattggcttactaaccaacatactaactatatatsratgakgacgagacattgtrcgagagggkdcaccccatnnnnnnnnnnnncccattgyacaaaaagggctycsatacgcggataattnnnnnnttnngtgnnnnnnnnnnnnnnnnnnnnnnnnnnnnnnnnnnnnnnnnnnnctccagcctaktacccacacatgacctagtggggannnnnnnnnnnnnnnnnnnnnnnnnnnnnnnnnnnnnnnnnnnnnncattattaaacacatcagnnnnnnnnnnnnnnnnnnnnnnnnnnnnnnnnnnnnnnnnnnnnnnnnnnnnnnnnargcgannnnnnataaannnaagcannnnnnnnnnnatcatcttardggtgnnnnnnnnnnnnnnnnnnnnnnnnagagtacttagaaacttctttttccatctcagacrgaayctatggatctacattctttatagcaacargttttcacggtctccatgtaatcattggaacatcattccttacagtatgcttattacgacaatttaaatttcactttacatcaaaacaccatttcggatttgaagccgcagcatggkactgacactttgtagatgttgtatgacttttcctttacgtatcaatctattgatgaggctcatamwwwmwgaaaaannnnnnnnnnnnnnnnccgcccccgggggggacccccagctttggtcccctttagaggggggaaatggcgccctgggggaaataagggccaaagctgttccctgggg

SEQ ID NO: 3526 - DNA, 1175 bp, Cricetulus griseus
  misc_feature (10)..(39): n is a, c, g, or t
  misc_feature (42)..(169): n is a, c, g, or t
  misc_feature (180)..(241): n is a, c, g, or t
  misc_feature (254)..(321): n is a, c, g, or t
  misc_feature (332)..(361): n is a, c, g, or t
  misc_feature (363)..(387): n is a, c, g, or t
  misc_feature (389)..(402): n is a, c, g, or t
taacttctannnnnnnnnnnnnnnnnnnnnnnnnnnnnnctnnnnnnnnnnnnnnnnnnnnnnnnnnnnnnnnnnnnnnnnnnnnnnnnnnnnnnnnnnnnnnnnnnnnnnnnnnnnnnnnnnnnnnnnnnnnnnnnnnnnnnnnnnnnnnnnnnnnnnnnnnnnnnnnaaaatttgatnnnnnnnnnnnnnnnnnnnnnnnnnnnnnnnnnnnnnnnnnnnnnnnnnnnnnnnnnnnnnntcctcatgatatnnnnnnnnnnnnnnnnnnnnnnnnnnnnnnnnnnnnnnnnnnnnnnnnnnnnnnnnnnnnnnnnnnnncttgacttctnnnnnnnnnnnnnnnnnnnnnnnnnnnnnntnnnnnnnnnnnnnnnnnnnnnnnnncnnnnnnnnnnnnnngatgacacggacgacaagacgcaaatactgcagccctacaggcaattttatataatcgcattggggacattggctttgttataacaatagcttgactatgcttaaataataattcctgagaatttcaacaaatctttatatcagaaaacaaaagcctcattcctttactaagcttwckwsymrcagcwmcrggaaaatctgcacartttggactacacccatgacttcrcctcagctatagaaggccctacaccagtctcagctctactacactstagcactatagtagtagcawraatctttytactaakccgctwscacccaataatctcaaataataacactgcycwtactatcatattatgtttaggttccataacaacactattcacagctaatctgtgccgctcacacaaaatgatattgaaaaaatcgtacccttctcaacatcaaaccaattaggcctaataatagtaacatgaggaattaaccaaccacacctagcctttctacacatactgtacacacgcattcttcaaagctatgttattcatatgctccggatcaattatccatagcctaaatgatgaacaagacattcgataaataggaggactattaaaaccactaccattcacctcatcatgcttgataattggaagcctagccctaacaggaataccattgctaacaagcgtttattcaaaggacttaatgatcgaagccgcatacacctgttgtacaaacggcctgacccctatgatttacactcg

SEQ ID NO: 3527 - DNA, 324 bp, Cricetulus griseus
  misc_feature (181)..(323): n is a, c, g, or t
tgaaatgcaactctgactattgtacagttaattcctcactgaggactccaaacattcctgtgtttcacgtgtactgaagaacactgttgtgtgatgcttggtgtaaagttattgtgaaaattttattgtctttatttttaccaaagatttcccatagttcgaagcatttgaagcaataaannnnnnnnnnnnnnnnnnnnnnnnnnnnnnnnnnnnnnnnnnnnnnnnnnnnnnnnnnnnnnnnnnnnnnnnnnnnnnnnnnnnnnnnnnnnnnnnnnnnnnnnnnnnnnnnnnnnnnnnnnnnnnnnnnnnnnnnnnnnnnna

SEQ ID NO: 3528 - DNA, 776 bp, Cricetulus griseus
  misc_feature (13)..(80): n is a, c, g, or t
  misc_feature (82)..(131): n is a, c, g, or t
  misc_feature (140)..(140): n is a, c, g, or t
  misc_feature (142)..(153): n is a, c, g, or t
  misc_feature (183)..(242): n is a, c, g, or t
  misc_feature (257)..(260): n is a, c, g, or t
  misc_feature (262)..(291): n is a, c, g, or t
  misc_feature (293)..(306): n is a, c, g, or t
  misc_feature (315)..(316): n is a, c, g, or t
  misc_feature (342)..(386): n is a, c, g, or t
tatacattacacnnnnnnnnnnnnnnnnnnnnnnnnnnnnnnnnnnnnnnnnnnnnnnnnnnnnnnnnnnnnnnnnnnnntnnnnnnnnnnnnnnnnnnnnnnnnnnnnnnnnnnnnnnnnnnnnnnnnnncttcatgtnannnnnnnnnnnnattacggttcatacactatagtagaaactnnnnnnnnnnnnnnnnnnnnnnnnnnnnnnnnnnnnnnnnnnnnnnnnnnnnnnnnnnnnctaccatgaggtcannnntnnnnnnnnnnnnnnnnnnnnnnnnnnnnnntnnnnnnnnnnnnnncgaccacanntaccactctagtagaatgaatctgannnnnnnnnnnnnnnnnnnnnnnnnnnnnnnnnnnnnnnnnnnnnttccatttcatcctaccattcattatcgctgccctagcaatggkccatcttctattcsyacatgaraccggctctaataacccaacaggcctagattctgacscagataaaattccatttcatccctactatactattaaagacctactargagccttcatgctattaattgctctcatwactttartattgtktttcccagatattttargagaccctgataattatactyctgcrwatccactcaatactcccgcacacattaaaccagartgatacttcctattcgcctacgctatcctacgatctatccctaataaactaggargagtcctarccctaatcctctctatcctaatcctagcaactctatcattactacacacatct

SEQ ID NO: 3529 - DNA, 581 bp, Cricetulus griseus; identical to SEQ ID NO: 584

SEQ ID NO: 3530 - DNA, 529 bp, Cricetulus griseus
  misc_feature (38)..(55): n is a, c, g, or t
acctggaggtggcaattttggaggtagccctggttatnnnnnnnnnnnnnnnnnntatggtggtggaggacctggatatggcaaccagggtgggggctacggaggtggttatgacaactatggaggaggaaattatggaagtggaaatkrcartgattttggaaattataaccagcaaccttctaactatggcccaatgaagagtggaaactttggtggtagcaggaacatgggaggaccatatggtggaggaaactatggtcctggaggaagtggaggaagtgggggctatggtggaaggagccgatattgagcttcttcctatttaccatgggcttcactgtataaataggagaggatgagagcccagaggtaacagaacagcttcaggttatcgaaataacaatgttaaggaaactcttatctcagtcatgcataaatatgcagtgatatggcagaagacaccagagcagatgcagagagccattttgtgaatggattggattatttaataacattaccttactgt

SEQ ID NO: 3531 - DNA, 783 bp, Cricetulus griseus
  misc_feature (111)..(118): n is a, c, g, or t
  misc_feature (120)..(146): n is a, c, g, or t
  misc_feature (202)..(208): n is a, c, g, or t
  misc_feature (210)..(222): n is a, c, g, or t
  misc_feature (225)..(226): n is a, c, g, or t
  misc_feature (259)..(267): n is a, c, g, or t
  misc_feature (280)..(303): n is a, c, g, or t
  misc_feature (429)..(465): n is a, c, g, or t
  misc_feature (494)..(503): n is a, c, g, or t
  misc_feature (507)..(510): n is a, c, g, or t
  misc_feature (516)..(541): n is a, c, g, or t
gtcgacccacgcatcckstssycatmatwwacttcacaattttttcaggcccaatagtcactatgctcagctccagtttctttcttrtatgaatkggkttaraaataaacnnnnnnnntnnnnnnnnnnnnnnnnnnnnnnnnnnnaacccacsatccmkaraasvatsrrcraaatrctttatkwckvmccactcgtccgnnnnnnngnnnnnnnnnnnnnggnncctcaactataaacaaatrggkctatgracatnnnnnnnnncaactaataatgnnnnnnnnnnnnnnnnnnnnnnnngrctgbsaaycaaayyaggcctttctccattycacgcctgactycctgawskttccccggaattccactctagatgggaccacttttactcacctgacaawwagtagcccccttgactaccttacnnnnnnnnnnnnnnnnnnnnnnnnnnnnnnnnnnnnnsccctctgcccttatctcakyactagktnnnnnnnnnnarannnnawaccnnnnnnnnnnnnnnnnnnnnnnnnnngattcatccatctcccatatargctgaataatctctattstcccatacaacccatsacttacaattatsaatstaattatctacatcatatkaacactagctgtattcttaatwctacatacccactstttctcgtstatcaaaactatatcactactaygaaataaagcaccagcattattaccaatcatarccmtarttttattatcaacaggaggactcccaccacttagcaggatcat

SEQ ID NO: 3532 - DNA, 1503 bp, Cricetulus griseus
  misc_feature (32)..(38): n is a, c, g, or t
  misc_feature (46)..(60): n is a, c, g, or t
  misc_feature (62)..(78): n is a, c, g, or t
  misc_feature (112)..(141): n is a, c, g, or t
  misc_feature (208)..(209): n is a, c, g, or t
  misc_feature (297)..(308): n is a, c, g, or t
  misc_feature (655)..(655): n is a, c, g, or t
  misc_feature (1080)..(1107): n is a, c, g, or t
  misc_feature (1451)..(1465): n is a, c, g, or t
tgtagtagtgtcaaacacttacggaacaaacnnnnnnngcgtgggnnnnnnnnnnnnnnngnnnnnnnnnnnnnnnnntctctsatacycctacctctaacctggttatcannnnnnnnnnnnnnnnnnnnnnnnnnnnnnagacacagtywcttaatcaatactttarctatagcaactctatgacgaaggaacgaarcavgykttnnactctcccacacattktatatygatgcactatcttgatcaykaatyatattacttatctaacttctaccactgatactactagctatnnnnnnnnnnnntaaaaaagaaaccgactacaacraaaaactttatrttkctatactaatyattctacaaactctkctaatsccaacattytcagcaaacgagstyatactattttatattktatwhgargccacacttmttccaactcttgtraycrtywcacgatgaggaamccaaacmgagsgatkaagbgcrggcctttactttctstyttacacactaskrggmkmratsccattactaatkgckktaakttscatcaactctysactargrtsattaaatacatyacttckaactytatckmmttmkrkatdvaaccaayyatggdstawccatattttatkactakcatgcnkgatasccywtdtwatmaaartacctktatacsgagkacmtvyatgactbccwaaagcwcatgkrvaarccsmtwtkgscgggkstwtwattctagsggstwttytmytaaaattrrgrggbkacggratrmtacggctwtmggdaattctagathcactaacaaaatctrtggmttatccatttattatactaycactatkaggaatwatcrtdskdgskrkaatmtgcctmmrackgggaggcctawamtcayttatkgmstactmatmastsastcacatggyaytagttattgcagctattataattcaaacaccatgaagttttataggagcctcagcactaataawcgywcawggbyttacatcttmtmtactmtywtgtsttgmtaatactaactatgaacgtatscacagccgaacnnnnnnnnnnnnnnnnnnnnnnnnnnnngctytycccctyawagccctattttgattcttaggaagcctwactaacctarcccttccaccatcaatcaatytaattggagaattactaayctcaawttyactayyctcatgatcwaattttaccatcttattagtaggaactaacatcctaattacagccctatattcactatatatactaatwactwctcaacgaggtaagttaacaccacatataattaatctacaaccatcacacacacgagaacttaccttaataatactccacattacaccactttcacttttaatgattaacccaaaatttatcataggcaatacattataaaaaaaaaaagcttnnnnnnnnnnnnnnncgcccccccgcggggggcctccacttttggttccctta

SEQ ID NO: 3533 - DNA, 966 bp, Cricetulus griseus
aagtcgcgttgaaaacagggagtgcttggtgccccccgcccccatgcccacccaggatgcccctgtcccgcttgctgagatctgcgggggtcttcctgctgccggscccctgctgggcaccccgggagaggtggcttggttccctacaacgaccctccctggcatatgggtgtccagtcctgggggcctggcacagtgcccgctggtsgwsccamgygtkgmsrkwgmarmmymgagtatttygckyykmwmdsagaatgaatgggaaccagaaattggatgcttgtamccaagaaaggcaggatttcatccagcacttctcccakatcgtgaaggtgctgactgaggacgggctaggccacccaragacaggcgatgccattacccggytmaarsaggtcctakagtacaatgctgtgggaggcaagtacaatcggggtttgactgtgttgcaagcataccgggagctggtggagccsadgaaacaggatgctgakagtcttcadcgggccctgacagygggcykgtgtgtagaactgctccaggctttctttcttgtgtcagatgacatcatgrattcctccctcactcgacgtggacagatctgctggtatcaraagccargcatargcttggatgccatcaatgatgctatgcttctggaagcctgcatctaccgcctactgaagttctactgcagggagcagccctactacctgaacctcctggagctctttctgcagagttcctatcagacggagattgggcagactctcgacctcatcacagcaccccakggccatgtggatcttgatagatacactgaaaagaggtacaaatctattgtcaagtacaagacagctttctattctttctacctgcctgttgcagctgccatgtacatggccggtattgatggggagaaggaacatgccaatgccaagaagatcctgctggagatgggag

SEQ ID NO: 3534 - DNA, 277 bp, Cricetulus griseus
aatgtcacttagaaaggctaacttggtttattgttcagtgggggtagaaaaagcttcctaaaactgaaatatttcaaggaaactgatcttcaaattctgacattggttattctaagcaactgaaccaattgctcacttggtcataaaataagcaaaaactagattcttcagtgtagcagagactccccagactcattcagttctacttttacaaataagattttacatgtattaggaagattttgtgcaacagaaaagttgtacagaaagtacattc

SEQ ID NO: 3535 - DNA, 447 bp, Cricetulus griseus
agactcatactgtgtgtctcagtttgcttgtcaccatgtttctgtacaacttgaccttacaacgggccactggcatcagctttgccatccatggcaacttctctgttcctggagggtcagatggtccaagtggagtgctgatctgtgctgaaaattatattacctataagaactttggtgaccagccagatatccgatgtccaattcccaggagacggaatgacctggatgaccctgaaagaggaatgatttttgtttgctctgccacccataagaccaagtccatgttcttctttttggctcaaacggagcagggagatatctttaagatcactttagagacagatgaagatatggtaactgaaatccgcctgaagtactttgatactgtacctgttgctgctgcaatgagtgtgcttaaaacaggcttcctttttgtggcatcag

SEQ ID NO: 3536 - DNA, 540 bp, Cricetulus griseus
atgcaataattaaagaagagcttgatgaagactttgagcagctttgtgaagagatccaggagtctaggaagaaacgaggttgtagttcctccaaatatgcaccatcttattaccatgtcatgccaaagcagaattctcctcctgctggtgataaaaggtcagctcaagagcccagtgaaaagctgaaggcaccgtgtcctcctgtggcttgcagtacccctgctcagttgaagaggaaagttcataataagtcaaagtggcatgtaggtaacaaaataaagcgaaggaaactttcacaagcaaaagacaatggccaaactgctgtgaataatcaagtcaggagtagtgatacggaggaaagtcagcccacaagcacagagcacaatgagctgggaaacacgggagagtcttccgtagaagagaatgagaagcagaatgtctccgaaaacaacctagacctgaaaaatacctcgagtacctccaatattgagaatgagcttgaagaatctaatgaaattacagagtgtgcagacttgagaa

SEQ ID NO: 3537 - DNA, 600 bp, Cricetulus griseus
  misc_feature (14)..(14): n is a, c, g, or t
gtcgacccacgcgntccgaatagatttccaaggcagaaggggttgaaggcaagcccatgactgctatcacgggccatgggcatggcagatgggcccagccattgctgtgcagagtgtagcaatagagagcccctcactgtcgcatggccctccccagagcatgcccaacccaggagtctgtctcattgtttatctaaccaccaagagagcccctcccttaaaacagtatgccctcacaaacctaccatgtgaatgaactgggaaaggggcatgacccccaggtgtgtatagctgtgagtttcaataatctagcactatgttggacccactccccttccacccagccagctttgctgtcagatacaagtcctgttccctgtttgtcctcttccagggactgtagcctggaggcttccacacagcccacacatctcttaggctccattataatcactttcctagagacgctggcctgtctgtgaaggctgagcttgtgtgtggtgttgggtttatgcctcctgctccctcccaccctgtatctgggcatagttcacatcaagtgtgtatccgccaggctccaggacctttctggatttgcca

SEQ ID NO: 3538 - DNA, 123 bp, Cricetulus griseus
  misc_feature (3)..(3): n is a, c, g, or t
  misc_feature (6)..(6): n is a, c, g, or t
  misc_feature (23)..(23): n is a, c, g, or t
  misc_feature (34)..(34): n is a, c, g, or t
  misc_feature (50)..(50): n is a, c, g, or t
gtncgnaccccacgccgctccgnattagcctttnacatttttttcacttnctcggggactgttgctattttccgattcttcaccctaatgtctaccgctttctattgtgttaagaaagggaat

SEQ ID NO: 3539 - DNA, 528 bp, Cricetulus griseus
  misc_feature (8)..(8): n is a, c, g, or t
  misc_feature (68)..(68): n is a, c, g, or t
  misc_feature (73)..(73): n is a, c, g, or t
  misc_feature (80)..(80): n is a, c, g, or t
  misc_feature (147)..(147): n is a, c, g, or t
  misc_feature (154)..(154): n is a, c, g, or t
  misc_feature (185)..(185): n is a, c, g, or t
  misc_feature (191)..(191): n is a, c, g, or t
  misc_feature (250)..(250): n is a, c, g, or t
  misc_feature (353)..(371): n is a, c, g, or t
  misc_feature (447)..(447): n is a, c, g, or t
  misc_feature (487)..(487): n is a, c, g, or t
gcccctantacgcctgcgcgcaccggcaggcgtctcgaggcgggtggtggacgatggcggcggcccangccgnggagganatgcggacgcgcgtggttctgggagagttcggggttcgcaacgtccacaccaccgacttccccggtnactactngggttacgacgacgcctgggaccaggaccgnttcganaagaatttccgtgtggatgttgttcatatggatgaaaatacactggagttcgacatggngggaattgatgctgccattgctaatgctttccggagaattctgttagctgaggtgccaacaatggcagtggaaaaggttctggtttataataacacatccatnnnnnnnnnnnnnnnnnnngctcaccgcctggggctcatccccattcttgctgatccacgtctgtttgaatataggaacccaggggaggaagaangaacggagatagacacactgcagtttcggctacaggtcangtgtaccaagaaccccaatgctgctaaggattcctctgatc

SEQ ID NO: 3540 - DNA, 445 bp, Cricetulus griseus
  misc_feature (276)..(276): n is a, c, g, or t
  misc_feature (341)..(341): n is a, c, g, or t
  misc_feature (422)..(422): n is a, c, g, or t
  misc_feature (431)..(431): n is a, c, g, or t
  misc_feature (436)..(436): n is a, c, g, or t
attctctctcagcccacaccctcgcttgttgtggaccataggcgcttaaaaaatcttttggagactgttgttaaaaaaagtcaggaatataatatattccaactggaaaacttgtatgcagttatcagccagtgcatttatgagcatcgcagggactatgacaaaacagctcttgttcagaaaatggagcaagcagtagaaaacttcaattgttccagatcatgatgtcattgcaccaagtatttttatattcaattcctatttgattgtcttcanatatgtccacataactgatgcaagataaaatgaaatcttgcattttgaagaaaaattaaaatagngaaagtattttaattccctggtacttatgtacatgtggtaagataactgataagtcttggatgtttgagcagaacactgtnacaatagtnattgntcaagtttg

SEQ ID NO: 3541 - DNA, 323 bp, Cricetulus griseus
  misc_feature (224)..(239): n is a, c, g, or t
ggcgtgagcttcggccgccattttacaacagctccactcgcgccggacacagggagcagcgagcacgcgttccccgccacccgacccggtcggacaggattcctcggccgcagccccgcggggagatctctggaaacatggctacagaacatgttaatggaaatggtactgaagagcccatggatactacttctgcagttatccattcagaaaattttcagacnnnnnnnnnnnnnnnnttaccacagaaagttgctggaaaactagatgaaatttacgttgcagggctagttcacatagtggttttagatgaaagaagcctt

SEQ ID NO: 3542 - DNA, 567 bp, Cricetulus griseus
aacctacagaaggatatgcctatgaaagtacaagaagcttacaggacaccaaacagactggaccacaaaaagaagtccccccgacacataataatcaaaacaccaaatctacagaataaagataaaatattaagagcagcaaaggaaaaaggctaagtaacatataaaggcaaaccaattagaatcacacccaacttctcaatggaaactctgaaagccagaaggtcttggatagataccctacaagcactaagggagcatggatgtcaacccagattattgtacccagcaaaactttcaatcattatagatggagaaaacaagatattccatgacaaaaacagatttaaacaatacatatccacaaatacagcactacagaaggttctgaaaggaaaactccaacccaacgaacataactagaaaacaaacaagaaccaatgaacaatggatattaatatccctaaatgtcaatggtcttaacttacccataaaaagatataggctaacagaatggatacgaagacagaatccatccttctgctctttacaagaaacacacctcaa

SEQ ID NO: 3543 - DNA, 579 bp, Cricetulus griseus
  misc_feature (474)..(498): n is a, c, g, or t
ttcaggacttaaggaaatagcagtacacgtttaataatagcactgtatagcaaagtgttttattttgttgtttggataactcatatactggtaaaatatgttttgtgacataagaatagacaaatcatgttttctcttaattgacaatttgctagagtttcaagattacccatatccccataaatgacatgagatattgagaactaaatactagaagccgttttttgtagcagtgtttgaactgaatgttttggagtcacagttccttctttgtttttacctcctgtggtgattaagggccctgttgaaatttagggattagcccttatgagccaggtatggtaacatacaactataatcacagcactgaaagaggctgaaggttttgattttaaacccagcctagactgcagaacaaattccatgccagccttgctacataagaccttgtgtccccatctcccccaatttatnnnnnnnnnnnnnnnnnnnnnnnnnccgcccccgcgggggacccccactttttgtcctttaatggagggttaatagcgccctggccgaaacaagggacaaacctgt

SEQ ID NO: 3544 - DNA, 498 bp, Cricetulus griseus
  misc_feature (135)..(156): n is a, c, g, or t
  misc_feature (161)..(214): n is a, c, g, or t
  misc_feature (246)..(297): n is a, c, g, or t
  misc_feature (321)..(371): n is a, c, g, or t
  misc_feature (382)..(396): n is a, c, g, or t
  misc_feature (398)..(412): n is a, c, g, or t
  misc_feature (414)..(447): n is a, c, g, or t
gtcgacccacgcgttccgggatacacaaattttggacagggattattcctaactataccttacacattagatactactacagcattctcatcaggcacccacatttggcgagatggtaattacgggtggctaatnnnnnnnnnnnnnnnnnnnnnnagctnnnnnnnnnnnnnnnnnnnnnnnnnnnnnnnnnnnnnnnnnnnnnnnnnnnnnntcatacactatagtatgaaacttcgaaacgcnnnnnnnnnnnnnnnnnnnnnnnnnnnnnnnnnnnnnnnnnnnnnnnnnnnnctaccatgagggcaaatatcattnnnnnnnnnnnnnnnnnnnnnnnnnnnnnnnnnnnnnnnnnnnnnnnnnnntaccactctannnnnnnnnnnnnnntnnnnnnnnnnnnnnntnnnnnnnnnnnnnnnnnnnnnnnnnnnnnnnnnntttcatcctaccattcattatcgctgccctagcaatggtccatcttctatt

SEQ ID NO: 3545 - DNA, 579 bp, Cricetulus griseus
ggctggatatgccaagtgactcgcctattgcctgaaggcttttagagtctttagatggccttctgactgtctagggttctttccaacccgtgcagcactcacaggccaagactccggcttattcccgtcacaaccagatatgtagtgaggagagtcctggactcagtggtgaggagaagccacgaagacaggaatttgccgcttcatctgtcggcatgctgttcctagaagtctgccctgagaggggggtgtctttgctgggagagtttgatgctgagcaccatgctgtgatgggggaaggtttgaagaatgtgtcgaaactttctggattcttctcaaagatgaattcctaagccaagctacaagttcatccaggctcagaattccaggattgtgggcaggagccatcatcttcactatatttttagatttttttaaaaggtggaattgaggatccagatctagagggagacaaggaaggtaaggagaaagttgtagcagttgagctagaaagtcttgttagaatttttgatggggctgactggacagggggaaatgtggtcctatcccttttatcta

SEQ ID NO: 3546 - DNA, 579 bp, Cricetulus griseus
  misc_feature (396)..(512): n is a, c, g, or t
  misc_feature (572)..(572): n is a, c, g, or t
gtagctgccaagaccaagggccctgcaggggaccgagtccggccactaagtgcccgcagtgagcctgcagacaagccaggccgtgtgcccctcaccaggaagccctcagtccccaagactgtctcaaaagtgtctcctgccacgaggacctcctctgggctcagtggccgcccagtgccacctggggctggctcccctgtctacctggacctggcttacctgcctgggggtggcgcgggccacctggacccggactttttccttcgagtacgtgcactctgctatgtcatcagtgggcagggccagcgccaggaagagggcctgcgggccgtgttggatgcactgctggctggcaagcagcagtgggaccttgacctgcaggtcacactgatcccnnnnnnnnnnnnnnnnnnnnnnnnnnnnnnnnnnnnnnnnnnnnnnnnnnnnnnnnnnnnnnnnnnnnnnnnnnnnnnnnnnnnnnnnnnnnnnnnnnnnnnnnnnnnnnnnnnnnnccctgcctgcatagtggagttctagccacgggccacagcacaccctgaggacagcagctnctcactg

SEQ ID NO: 3547 - DNA, 355 bp, Cricetulus griseus
gtacctattggaatacaagtatggaaatcaactgttgaacacgtttgctgtagctctttctttcctcaagaaccaaaattgtttgtcagctggtagaacaggttgaagtctgcctgtatcagctaatgcttccatttatgttaggtgatgcagggactgacacgttggagaaaggaaaattgtggttaagaatttccagtaagaacctaataactgagattattaagggagttttctatttcagatgatacaattataacagaagtcaactcatagtcattatagcaagatgaacaaaccctatggtttttttgttgtcgctgcttgatctttttttttccttttttttttcctt

SEQ ID NO: 3548 - DNA, 216 bp, Cricetulus griseus
gtaccactaagtccagcagaactttttggaaatatgttagctagtttgatattatataaaaataagggaaatatcacctgaaaataaaggattcataatagaatggtattttgtggggcacttgtaatgtttacaatattaataaaccaatatacattttaccattgtaactgaaataacataatcattcctatgacatagaaggttcacttaatt

SEQ ID NO: 3549 - DNA, 567 bp, Cricetulus griseus
tcaatctcctaaaacacttctttttggggcattatctgagatccctggctcctccaaaagggctcggctcgaattagaaagtcctcaagaagcattttggattctgagatatctaccgcttaccagactcccaagaagagtaaccaaaaatctccaaactttccaaagactacaccaagaaggaggttccctcgtatggtacagacctcactgtgcactccagaaagactacaaaactcccctacaaaaataactccagctgaggggggcatttctgaggcattctcctcacatagttacagttcaccattggcatcaaaggtcactccccaaaagagagtctccccaacagaacagacctctcctcttctcacagagctgcccagcacacccagggggccagacgtccaactacctcgatgcttgtcggactgtgcatggctaaactcagtgaattccagtccagaaagcccttattgtcccccatccccaccttgcctgactgccgaatctcagagtcagtgtctaagccctgcaagatacttcagaacatctccacgtacagcc

SEQ ID NO: 3550 - DNA, 550 bp, Cricetulus griseus
gctgatgttccagaaagctgattctgatttggattacattcaatataggctggaatatgaaatcaagaccaatcacccagattcagcaggagagaaaaatgcagttgcaattttaaaggaattatcagcaataaagtctcggtatcaagctttgtgtgcacgctttaagccactttctattgaacaaaaagagaacaagagccgcatttgtgctactctgagcaagacaatgaccacgatacaagaactacaaaaacagacagatctggagctaactcaactgactgaagaagagaaagcggtgacagagcagttaaaatctcacatgccggacctataaagacatggaattttaaaaaggaactctaatggaggaaagatcaattccaaagagattcagcatgatgtcgtattgatgtcattaatccatcaaggagttggaagctgataagaagattgagattttccttgatcatgatgcttttaatatgagaggaaattgtaagaagggtgtatatcatataactaaaagccaagaaggatgaaatga

SEQ ID NO: 3551 - DNA, 472 bp, Cricetulus griseus
gaccttgttccagcagctcgcccctctgtatgaaattgtaatcttcacatcagagactggcatgactgcatttccactcattgatagcgtggatccccatggcttcatctcttaccgtctgttccgggacgccaccagatacatggagggacaccatgtgaaggacatttcatgtctgaatcgggacccatcccgagtagtggtcgtggactgcaagaaggaagctttccggctacagccctacaacggtgtcgccctgcggccctgggacggcaactccgatgaccgggtcttgctggacctgtctgccttcctcaagaccattgcagtgaaccaagtggaggacgtccggactgtgctggagcactatgccctagaggatgacccattggaagcattcaaacaacggcagagtcggcttgagcaggaggagcagcagcgcctggccgagctctccaagtgcaacaagcag

SEQ ID NO: 3552 - DNA, 600 bp, Cricetulus griseus
ggaagataaatatttttgtgaaaattgccatcattatacagaagcagagcgaagtctcttatttgataaaatgccagaagttatcactattcatctgaagtgctttgctgctagtggcttggagtttgattgttatggtggtggactttccaagatcaacactcctttattgacgcctcttaaactgtcactagaagaatggagcacaaagccaactaatgacagctatggattatttgctgttgtgatgcacagtggcattaccattagtagtgggcactatactgcttctgttaaagtcactgaccttaacagtctagaactagataaagggaattttgtgtttgaccagttgtgtgaaataggtaagccagagccactgaatgaggaggaagcaagggggatggctgaaaattacgatgatgaagtgtcaattagagttggtggaaatgcccagccaagtaaagttttgaacaaaaaaaatgtagaagctgttggacttcttggaggacaaaagagcaaagcagattatgagctgttcaacaaagcgtccaatcctgataaggttgccgggacagcatttgttgaaaatagaaattc

SEQ ID NO: 3553 - DNA, 479 bp, Cricetulus griseus
tatgaaggcaaagcagagagcagaggttcttcagtccacgcaacggttcttctctgaacaacaacagagcaaacagataggaggcaaaggccagaaagtggacagtgattcaagtaaatctccagaaaccctgactgaccctcctggtgcctgtcaggaaaaagtagaagaaaagccacctcctgcacccaccataaccaccaaacctgttagaactggaccaatcaaacctcaggccatcaaaactgaagaaacaaaatcttaaaagcttttgtttattgcagggcattgggggtggggcgggcagggaacatgaagtcaaaacaatgccagcagccaggcggtaaaatggtctatgacattatcctgtgtagcacttgaagatgcacaaggggcatagagcattttatactgatagagctgctacaccagttaaaatgaggctttacaggcttgcacctactatgtaacatttgcta

SEQ ID NO: 3554 - DNA, 440 bp, Cricetulus griseus
tcaagaaattgtgcacagtgccttgcccataataggtactcaataaacagttattcctcatagtctgttgccatggtttctagtgttttatgaaatttgtcttaattgaaaaagaccaaatatttcaaataaagcttataggcagctgtgtccagtcactgtagggttgtacagttagttcctaggatgttattttgcactagttgtcacttagaaacatggggttctgtagattcttggtgctaagggatactttgtcattttgatgaagtaagtgttaagtgtcagataaatagcacagaatagttctttctgcaggtctgggtttttgttttgtttttctttgttgtttttaattgtaaaatgttaccaatcaaactattgtagcagctacaaaataattcaccagcatgacaaaatagtcaaaaaaaaaaaaaatg

SEQ ID NO: 3555 - DNA, 377 bp, Cricetulus griseus
tcttataagattgacttgtgcatctttttaaaaaagcttttcggatatttattacatgaatattgattgttttgctgattttgtatttggggtttttgtttaattgcacgtgatggcaatgattatgtgcccctggtactgttctaagaacttaatatattgtgtctctaacccttgtgtctttcaaggtagttgaaacctttctcattttatggttgagaagctgaatcattgacttaccaaggccagaactgctggtccatgcagggcgaggattctgacccatgtcttcttttgctataccacaacttcaaagggcagtcatttttcttgtggtacatagtagtaaaaaggagtaggcagaacatgataaaaaa

SEQ ID NO: 3556 - DNA, 328 bp, Cricetulus griseus
  misc_feature (37)..(51): n is a, c, g, or t
  misc_feature (198)..(198): n is a, c, g, or t
  misc_feature (249)..(249): n is a, c, g, or t
gacaccactgtgactcttgctccctttgaggacaccnnnnnnnnnnnnnnntttggctggcagcagcagttttcactgagtgaaaagaaactggaatcgaaactgtcttccaatggcactgcctcgtcagggtccaaggtcaccacagaggattcgggctcttcggagaggcatgccaagaaagaagactgacaattntatctgtgcttgggaggcaaaaagggagagttacttatttatagggtgtgngtggtatttctatgtaaatgatgtgaaaataagcctatctgtaagggatagaggagacaaaaaggaagaaacgccttat

SEQ ID NO: 3557 - DNA, 580 bp, Cricetulus griseus
  misc_feature (342)..(364): n is a, c, g, or t
cgcacactaacctccgcgtgcgagtcggtcgcgctccgagcccacccggccctgtactactactcggctttcctgtcaagatgcctgaggaggtgcaccatggcgaggaagaggtggagacctttgccttccaggcagaaatcgcccagctcatgtccttgatcataaatactttctactcaaacaaggagattttccttcgagaattgatctccaatgcttctgatgccttggacaagattcgctatgagagcctgacagacccttccaaattggacagcggcaaagagctgaagattgacatcatccccaaccctcaggagcgcacgctgactttggtgnnnnnnnnnnnnnnnnnnnnnnnagctgatctcataaataacttgggaaccattgctaagtctggcacaaaggctttcatggaggctctccaggctggtgcagacatatccatgattgggcagtttggtgttggattctactctgcctatctcgtggcagagaaagtggttgtgatcacaaagcacattgatgacgagcagtatgcttgggagtcctctgctggtggatccttcacagt

SEQ ID NO: 3558 - DNA, 128 bp, Cricetulus griseus
taacccgtaagtgctttctatcctgggaacctgtgttaggtgatcacaatgtaagctgcatgggataaggttgttttcctgttacaatgttgaaatccccttagctatgtttccaaaaaaaaaaaaaa

SEQ ID NO: 3559 - DNA, 512 bp, Cricetulus griseus
  misc_feature (332)..(392): n is a, c, g, or t
actttctctctcgtctagtttatcaagagttcagcaggagagggaaccctgcagctaagaaagactatttgtgggtagtgtttgccacaagtgttagtcttctctgttaaccttagggagacaacgtgaagcagagcttctagtgtttgctgttttcatggcagctaagtaagagccttgaggtgactccttgtgctcttcaatcaagccacacttaggggccctctctacagtattagaatcttatttgcctgattatgccctgtctgcatctatatatgtgtgacagtcactttttgcatggcttctgtgcctggcttgtggcatttggnnnnnnnnnnnnnnnnnnnnnnnnnnnnnnnnnnnnnnnnnnnnnnnnnnnnnnnnnnnnngcattgttaccctttttcttgctttctcctgagagaaggctaggaccagactgagaagacctgcagctgaccttttcttcccagtatggccacttcaaagtggaacaaatggtagtcaag

SEQ ID NO: 3560 - DNA, 579 bp, Cricetulus griseus
  misc_feature (522)..(522): n is a, c, g, or t
atgtgtgtcttttttccgatctttgttttgataataaatattctgctatcagtttgggacaattgtagagcctatggtcgtgtgaattattgtcttatacagcttgatgttactctgtccctgttcttagctatagcacccatttcctggtgcctgaggtccctgccatcagaaagtgatttgggtgagaattctgtcacttgtgcgcattaaagtgacacctaataaaacaaggatgtcctgcttttgttcagacactcgatatgaatgaagctttgcatcctagttggtcattgagccaacatcctcggtacctgatagtgacacaaaatagatgttggtgcctaaacggaattctcagtgcctgttgagacaggcgaatgtccgtaggtaaatccacggctgaaaggaccagttaaagtacacccactcatagtatcacaggatacccagaagcctctagtataacccagtactcttttcatcctcagatactctgaagagttagagttcgatacccanacttcatatttcctacgctctgaaatttgttttgatggatgcaacagggccaccttg

SEQ ID NO: 3561 - DNA, 566 bp, Cricetulus griseus
agaacgtgtttgctgggcagtcaaagatctatgcctacatgagtcccaacaaatgctctggaatgcgctcccctcttcaggaagagaactcagttgcacatcacgaggtcaaatgccaggggaaaccattagctggaatctacaagaagcgagaagagaaaagaaatggtgggagtacgatccgaagctctgtgaagtccgatgaacagaagatcaaagacgccaggagaggtcccctggcaccttttccaaaccaaaaatctgaagcagcagaacctccaaaaactccaccccagtcatgtgatcctacgaatacagtggttgccaagcaggccttgaaaaagcccctcaagggcaagcaggcccctcggaaaaagtctcaagggaaaacacagcagaatagaaaattggcagatttctacccggtgcgaaggagctctaggaagagcaaagctgagctgcagtctgaagaaaggaaaaaaattgatgagctgattgagagcgggaaggaagaacgcatgaacattgatctcattgatggaaaaggcagaggtgtgattgccacc

SEQ ID NO: 3562 - DNA, 553 bp, Cricetulus griseus
gtgggtgaaagacccgagctaacatggggttagttcgttaaattacaataaagcctcgtgcagtttgcagcaagctctcgaatccgcctggtgattggggtgaccgcgaacctggcctaagaccccggatacttgagttttcgggggtctaacattttgggggctcgtccgcgatttgtgaccacccttcacctgagtggattcgatcttggaggtgtctggagacatggctcagcagttaagagcacaggctgttcttctacaagatctctgagtgaatcccagattactgtgtgtgcttgtgtctgctgtggtgcacgtggaaagatcacagaacaacttacagaagccagttctctccttccatcaagtgataaataagtcaagagtactttcaaaagacattgctgtagaccaacatgtgaaactaagagaagcaaaaaggactctttcttttttgattttaggaaattgaatgatatatttgccattggttgtattttgctaattatgttatgaaatactggtaagggaatatagcctatattatact

SEQ ID NO: 3563 - DNA, 312 bp, Cricetulus griseus
ctgtgaggaaaatatgtgcccttgatgaccacgtctgcatggcttttgcaggtttgacagctgatgctagggtagtaataaacagagcccgggtggagtgccagagccataagcttacagtggaggaccccgtcactgtggagtacataactcgcttcatagcaactctaaagcagaagtatacacagagcaatggacgaagaccttttggtatatcggccttaattgtaagctttgatgatgatggtatcccaagactgtatcagacagatccctctggtacttaccatgcttggaaggcaaatgcaatag

SEQ ID NO: 3564 - DNA, 475 bp, Cricetulus griseus
ccctaaacgctacggcggttactgcgagtgttggcctgcgctgttcgagcacttcccggagcagctgtccagacagctttgagacagctcggcagttctgacctagtaccacccggcgcggagcaacctttgaaaacgcgcgcgcctaaacgctgcgacggttacagcgagtgtcagcgggagctgttcctgcatcttccggcctgggtgctcacacagctttgagccagctcgtcacttcacctttttacttgatcaagggtgtgactgtggacctaaagtgattgctacaatggaaggaatcaataatttcaagacaccaaacaaattatctgaaaaaaggaaatctgtattatgttcgactccatgtgtaactatccctgcctctccatttatgcagaagcttggctttgggactggggtcaatgtttacctaatgaaaagatccccacgtgggttgtctcattctccttga

SEQ ID NO: 3565 - DNA, 409 bp, Cricetulus griseus
atttggagtattctatgtaaaatataaatagatctgaagcagttaatccatcttataaagccatgatatataccacaatatggttatattaatatgattatttccctttgtctaccattatttgaactttatgataagcttatattaaactggttgttatattgatttgttaacttctcatatcaggcatttgccattgatatcacatcttgaagaaacttaaataattgttcaatacttataattatcaatgcattcagtgacctgtttaacatacttgaatgtcaccagcaatgctcaccttctaacagatcatatagagatagcatagttgctttatttcacaaatcactaagatagccattatatttccctccaaataattggctcttaaccatgggccagatat

SEQ ID NO: 3566 - DNA, 489 bp, Cricetulus griseus
aaaagctaaggttgaaacctgcaacagggtctgaggtacggggaaagctagaaacaaaatcggacctgaacttgcaacagcaggaagaggagaaagctcggctccttatcggtttaagtgtgggtgacaggaaccctggcaagaagtccctcttcagcaggcgcaagtgatctggagatccacgtgactgcagtctaggatctgactctggctcaggatctggggacttgggtgtgggcagagcttcccttcatgccacgggatttgggggctttggagctcatagggaactgagacccgttcaaccgctggcctgtccctgcagggcatggtggacaaaagtgctaaatttcctcatgcttattaggcccagggccagaaaggcaagagaatcagaaggcctgtggagtgtgtccaagcctagtatcctgcaacagaaagggtggggggatagttctgatcaagtatgataaatttttataaatagac

SEQ ID NO: 3567 - DNA, 350 bp, Cricetulus griseus
  misc_feature (69)..(105): n is a, c, g, or t
gaaataaaaataaagctaaactgtcattttcctgtttctcagcgcagtgaggaaggtaatggttatgannnnnnnnnnnnnnnnnnnnnnnnnnnnnnnnnnnnnaggcctcttctttttgtgtccttgtttctcctaggtaatgagaaaaggtctttttattgtcgctgtgttgctctctgagcatcttcttgtgtattcatgcagttgggagtgtttccacaaaattcacggcagccacaaaggaaaagtcctaaatcagactgtagtttagacacatgaccggggtgaagcaaacccacatggagtctttgatattcatgagtattggcctgaaggagagggagaca

SEQ ID NO: 3568 - DNA, 264 bp, Cricetulus griseus
ctcggcggggggatggtggtagagcacaacccgggccgcagccccagggctggactggagcgcacaggagggggcatcggagggcagattacggccgcaggactccgtctccgctcgctggaacccatgctcgtttcctgagagactgcacgctgggtgcctgtcgacgtcgagcgccctcctttcgattcctttcgactttgcgatcatctcaaggatgtcttccagaagtcccaaggatttaattaaatgcaagcggggatc

SEQ ID NO: 3569 - DNA, 480 bp, Cricetulus griseus
ttgtgggttgggctttggacattctgtctccaaacctgatctctaccagcatgcttgggcgcgtcaagtacaacctcaactccctgtcccatgatacagctgcggggctgatacagtatgcgttggatcagggtgtgaatgtcacccaggtatttgtagacactgtaggaatgccagagacataccaggctcgattgcaacagcgctttccagggatggaggtgacagtcaaggccaaagcagactccctgttccctgtggtcagtgctgcaagcatctttgccaaggtggctcgagaccaagctgtgaagaactggcagtttgtagagagtttacaggatctggattctgattatggctctggctatcccaatgatcccaagacaaaagcctggttgaggaaacacgtggaccccgtgtttggcttcccccagtttgtccggttcagctggagcacagcccaagccatcctggaaaagg

SEQ ID NO: 3570 - DNA, 286 bp, Cricetulus griseus
ggcaccggcgcgggccatggcttcatcctctctgttatccgcgttggctgtgcggttgctgcgccccgcgcccggctgccacccgcgcctgcagcccttccacctggcggcagtgcgaaatgaagctgtcgtcatttctggaaggggggggggtcatcagatcaagcaagaagtgcggcaggaggtggaagattgggtggcctcatgcaacaagcggccacacctgagtgtcattctggttggtgacaatcctgccagtcactcctatgtgctcaacaaaaccagg

SEQ ID NO: 3571 - DNA, 420 bp, Cricetulus griseus
ttcccagctgtctttactgagtcagccagccatgacacctgtacagtcttgattctatcattggccatctgtgtgagccttcactacaaggctccagtttcttcatctgtcaggtgtgaatagctatgcccacccttttgtcttttgaggggatggtaagttctggagtaccaaaagatcaggccgttctttttaaagaaatgttttcctgccagacaccagagtctgagtcaggcacccaagctgcctctcctcccagttagtatgttcacctacaaagaaagtgatttaaagtaggtgaagatgaaaggatatggctgaccccaaatgtgtgctggcatatatgtatgtactcatgtatggatcttagcagcagagttcactttctctacagtggcaaagtaacactaatatgggccg

SEQ ID NO: 3572 - DNA, 540 bp, Cricetulus griseus
  misc_feature (307)..(307): n is a, c, g, or t
  misc_feature (381)..(402): n is a, c, g, or t
  misc_feature (477)..(477): n is a, c, g, or t
ctcgctgtggggatgtctcacaatgtagatgggcgcaaattcagatacccacagctggacagcacacagagaatgagcgactttggagcactcgttcctaaatggaatgtattcatcaaacctctcccctcagggttcatggagctatgcggaagaagagcagaaagattgtaagtgccagagggaatggatgacatcacggaaactgtgtcttccagacacaagaggactgacgcacatatgaactcatggagactgtggcagtgtgcacagggcctgcacagcctcaagacagatgggatcccanaatgagagggggaggtggatgcaatctcccatccctaatcaagaagctgtctccaattgacaactactcgcaannnnnnnnnnnnnnnnnnnnnnatagtttcactgggtatttaagccacacttaagggcagaccccatgcccagaagtggatggccaacatagaacanactcaacaatatttttatagatttttttggttcatattgctttgagcacctttttatactaca

SEQ ID NO: 3573 - DNA, 2372 bp, Cricetulus griseus
  misc_feature (1)..(39): n is a, c, g, or t
  misc_feature (684)..(725): n is a, c, g, or t
  misc_feature (1698)..(1714): n is a, c, g, or t
  misc_feature (2328)..(2365): n is a, c, g, or t
nnnnnnnnnnnnnnnnnnnnnnnnnnnnnnnnnnnnnnnccggtctgcggagggccctagactggctctccttccctgacctagggtgatcaggttttaaaacctgccttcttggaatcgctggtagagcgtcacctggacgcgtgggaacgggaagtaagcgcagccctggagccacgaacgcggcctggagcccctgaaagcaaaagctagcagcggcctgtggcaggcttcgtccctgaagccgctcgcccggggccccggagctgtgatccgcaagctcgggaactgtggcccgcgagacccggacctgtgatcggcggcgagcagggactctacgaacaggtcaccactctcctgcctcttgaaaggaatggatttcagaaactgtctttacaagattgctgaaaacctggatagcagtgaactggctgccctcaagtttctgtgcttggactacatcccacagaagaagcaggagcccatcaaggatgccctgatgctatttcaggtactgcaggaaaagggactgttggaggaagacaatctgtccttcctgaaggagctgattttcctcatcaatcggctggacctgctgagcaacaccctaaacagcagcaaggaggagatggtgagggagctgcaggttccagacaaagcccaggtttctgcctacagggtcannnnnnnnnnnnnnnnnnnnnnnnnnnnnnnnnnnnnnnnnnaatcttttaagttttttttgaatgaagagattcctaaatgtaagctgtatgatgataactcgagcctgcttgatatttttgtggaaatggagaagagagtcatcctgagggaagaaaacttggatgccctgaaatcaatctgtgcccaggtcaacaagagcctgctggagaagattgaggcttatgaaaaatcaagcagagggagaatgagccttgaaggaggggcagagtcgccagtttcagttttagatggggagagttacttcagaatgcaggaaacgtgggactcccaaagagaacaagacagcgactcacaggtatcacacagaatttaccaaatgaagagcaaacctcggggatactgtctgatcatcaacaataatgatttcagtgaggcgaggaagaacatacccagattccacaaaatgaaggacagaaaaggaacaaactacgatgaagaggcattgactgagacctttaaagagcttcattttgaggtcaagccttacagagactgcacagccaataaaatccatgaggttctaagattctaccaaagcatggaccacaaggacaaggactgcttcatctgctgcatcctctcccatggagacacgggcatcatctacggcactgatgggaaggaagcccccatttatgaactgacatcttatttcactggttcagagtgcccttccctggctggaaaacccaaaatcttttttattcaggcttgccaaggggataactaccagaaagctgtacttgttgagactgactgggaagagatggtcagcttcttagacgtggactcatctcaaaagagctatattccagatgaggctgactttctgttggggatggctactgtgaaaaactgtgtttcctaccgagatcccacgcagggaacctggtacatccagtcactttgccagagcctgaggaaaagatgtcctcaaggcgacgatattcnnnnnnnnnnnnnnnnngtgaactatgatgtgagcaataaggatgacagaaagaacatggggaagcagatgcctcagcccatcttcacactacggaagaagctgtttttccctcctaagtgatgtgtgctctacatggttgacattatgtcagtctatgcacttttgtttggggggaggggtgggttttaatttattttttatgatttcttttattttgagatattatatcatttacctcttccctttcctccctgaaaagttggaatttgaagtccaaagcagaagcttgataaatggaacatcagttctaagtaaggtggcactctgaagccaggaaggttgtacgctaaccttactggcttctatttactagctccatgtctgtctgacagaacgtttaatttctgtaaacattaggctccacatcagtaaagtaggagcaatgaatttctagatcagcaaagcccttagcacaggcatggtatgtgctaaatgctcagcagcactctggccattttactgtttcttcctagttgaaatggatgtgttcccattctgacgccctgtaaacagggattgtgttcattatttctgtggttactggtgggtattaaaggtgggtgaatgcnnnnnnnnnnnnnnnnnnnnnnnnnnnnnnnnnnnnnncggggag

SEQ ID NO: 3574 - DNA, 1462 bp, Cricetulus griseus
  misc_feature (5)..(42): n is a, c, g, or t
  misc_feature (1411)..(1462): n is a, c, g, or t
gtacnnnnnnnnnnnnnnnnnnnnnnnnnnnnnnnnnnnnnntcggccggccatggacgaagcggaccggcagctcctgcggcgatgtcgggtgcgcctggtgagcgagctgcaggtcgccgagctctgggacgctctgctgagtcgagagctcttctcgggggacatgatcgaggacatccagagggcaggctctgggtctcggcgggatcaagccaggcagctggtcacagatcttgagacccgagggaagcaggcccttcctctcttcatctcctgcttagaggacacaggccaagacaccctggcttcattcttgcgaagtagtcggcaagcagccaagcaggatccagaggctgctaaacccctggaccacctggtgcctgtggtcctgggaccaatgggaatcgtatcaaaggagcagaaagtagtgaagttggagccatcgaagcctgccctgggaaacctcaccccagtggtgctggggccggaaggggtctggcctgctacgctcagaccagaggttctcagaccagaaacacccaggccagtggacatcagttctggtggtacctatgatgtctgtgctgcagagaagatcaggagtagtgcagatatggcatacatcctggatgcagacccctgtggctactgcctcatcatcaacaatgtgaacttctgtccttcctcggggctcggcacacgcactggctccagtgtggactgtgagaagcttcagttccgcttccgctggctgcacttcatggtggaagtgcagaatgacctgactgccaagaaaatggtcgcggctttgatggagatggcagggcgggaccaccgtgccctggactgctttgtggtggtcatcctctctcatggctgccaggccagccacctgcagttcccaggtgccgtctatggcacagacggatgctccgtgtcggtcgagaagattgtgaacatcttcagtgggactggctgtcctagcctgggagggaagccgaagctgttcttcatccaggcctgtggtggcgagcagaaagaccatggctttgaggtggcctgcacttcctctcgaggcagggacttagacagtgactctgagccagatgctgtcccataccaggaaggcccaaggccctttgaccagctggatgccgtgtcaagtttgcccacccccagcgacatccttgtatcctattccaccttcccaggttttgtctcctggagagacaagaagagcggctcctggtacatagagaccttggatggtgtcctggagcagtgggctcactctgaagacctgcagtccctccttctcagggtcgcccatgcagtttctgagaaagggatttataaacagattcctggctgttttaacttcctccggaaaaagctgttttttaaaacnnnnnnnnnnnnnnnnnnnnnnnnnnnnnnnnnnnnnnnnnnnnnnnnnnnn

SEQ ID NO: 3575 - DNA, 754 bp, Cricetulus griseus
  misc_feature (1)..(40): n is a, c, g, or t
  misc_feature (705)..(754): n is a, c, g, or t
nnnnnnnnnnnnnnnnnnnnnnnnnnnnnnnnnnnnnnnntagtggttgactttctctcctacaagctctcccagaaaggatacagctggagtcagtttagtgatgtcgaagagaacaggactgaggccccagaaggaactgaatcagagagggagacccccagtgccatcaatggcaacccatcctggcacctggcggacagccccgcggtaaatggagccactggccacagcagcagtttggatgcacgggaggtgatccccatggcagccgtaaagcaagcgctgagagaggccggcgatgagtttgagctgcggtaccggcgggcgttcagtgatctaacatcccagcttcatataaccccagggactgcatatcaaagctttgaacaggtagtgaatgaactcttccgggatggggtaaactggggtcgcattgtggcctttttctccttcggtggagccctctgtgtggaaagcgtagacaaggagatgcaggtattggtgagtcggatcgcaagttggatggccacctacctgaatgaccacctagagccttggatccaggacaacggcggctgggacactttcgtggaactctacggaaacaatgcagcagctgagagccggaaaggccaggagcgcttcaaccgctggttcctgacgggcatgactgtggctggtgtggttctgctgggctctctnnnnnnnnnnnnnnnnnnnnnnnnnnnnnnnnnnnnnnnnnnnnnnnnnn

SEQ ID NO: 3576 - DNA, 391 bp, Cricetulus griseus
atgtccggggctgcacgcgcgctacactgactggctcagcgtgtgcctaccctacgccggcaggcgcgggtaacccgttgaaccccattcgtgatggggatcggggattgcaattattccccatgaacgaggaattcccagtaagtgcgggtcataagcttgcgttgattaagtccctgccctttgtacacaccgcccgtcgctactaccgattggatggtttagtgaggccctcggatcggccccgccggggtcggcccacggcctggcggaggctgagaagacggtcgaacttgactatctagaggaagtaaaagtcgtaacaaggtttccgtaggtgaacctgcggaaggatcattaacgaaaaagagagagaaaaagccccggcggg

SEQ ID NO: 3577 - DNA, 1869 bp, Mus musculus
tacctggttgatcctgccagtagcatatgcttgtctcaaagattaagccatgcatgtctaagtacgcacggccggtacagtgaaactgcgaatggctcattaaatcagttatggttcctttggtcgctcgctcctctcctacttggataactgtggtaattctagagctaatacatgccgacgggcgctgaccccccttcccggggggggatgcgtgcatttatcagatcaaaaccaacccggtgagctccctcccggctccggccgggggtcgggcgccggcggcttggtgactctagataacctcgggccgatcgcacgccccccgtggcggcgacgacccattcgaacgtctgccctatcaactttcgatggtagtcgccgtgcctaccatggtgaccacgggtgacggggaatcagggttcgattccggagagggagcctgagaaacggctaccacatccaaggaaggcagcaggcgcgcaaattacccactcccgacccggggaggtagtgacgaaaaataacaatacaggactctttcgaggccctgtaattggaatgagtccactttaaatcctttaacgaggatccattggagggcaagtctggtgccagcagccgcggtaattccagctccaatagcgtatattaaagttgctgcagttaaaaagctcgtagttggatcttgggagcgggcgggcggtccgccgcgaggcgagtcaccgcccgtccccgccccttgcctctcggcgccccctcgatgctcttagctgagtgtcccgcggggcccgaagcgtttactttgaaaaaattagagtgttcaaagcaggcccgagccgcctggataccgcagctaggaataatggaataggaccgcggttctattttgttggttttcggaactgaggccatgattaagagggacggccgggggcattcgtattgcgccgctagaggtgaaattcttggaccggcgcaagacggaccagagcgaaagcatttgccaagaatgttttcattaatcaagaacgaaagtcggaggttcgaagacgatcagataccgtcgtagttccgaccataaacgatgccgactggcgatgcggcggcgttattcccatgacccgccgggcagcttccgggaaaccaaagtctttgggttccggggggagtatggttgcaaagctgaaacttaaaggaattgacggaagggcaccaccaggagtgggcctgcggcttaatttgactcaacacgggaaacctcacccggcccggacacggacaggattgacagattgatagctctttctcgattccgtgggtggtggtgcatggccgttcttagttggtggagcgatttgtctggttaattccgataacgaacgagactctggcatgctaactagttacgcgacccccgagcggtcggcgtcccccaacttcttagagggacaagtggcgttcagccacccgagattgagcaataacaggtctgtgatgcccttagatgtccggggctgcacgcgcgctacactgactggctcagcgtgtgcctaccctgcgccggcaggcgcgggtaacccgttgaaccccattcgtgatggggatcggggattgcaattattccccatgaacgaggaattcccagtaagtgcgggtcataagcttgcgttgattaagtccctgccctttgtacacaccgcccgtcgctactaccgattggatggtttagtgaggccctcggatcggccccgccggggtcggcccacggccctggcggagcgctgagaagacggtcgaacttgactatctagaggaagtaaaagtcgtaacaaggtttccgtaggtgaacctgcggaaggatcatta

SEQ ID NO: 3578 - DNA, 1920 bp, Rattus norvegicus
tcgcgctccttacctggttgatcctgccagtagcatatgcttgtctcaaagattaagccatgcatgtctaagtacgcacggccggtacagtgaaactgcgaatggctcattaaatcagttatggttcctttgtcgctcgctcctctcctacttggataactgtggtaattctagagctaatacatgccgacgggcgctgaccccccttcccgtgggggggacgcgtgcatttatcagatcaaaaccaacccggtcagccccctcccggctccggccgggggtcgggcgccggacggctttggtgactctagataacctcgggccgatcgcacgccctccgtggcggcgacgacccattcgaacgtctgccctatcaactttcgatggtagtcgccgtgcctaccatggtgaccacgggtgacggggaatcagggttcgattccggagagggagcctgagaaacggctaccacatccaaggaaggcagcaggcgcgcaaattacccactcccgacccggggaggtagtgacgaaaaataacaatacaggactctttcgaggccctgtaattggaatgagtccactttaaatcctttaacgaggatccattggagggcaagtctggtgccagcagccgcggtaattccagctccaatagcgtatattaaagttgctgcagttaaaaagctcgtagttggatcttgggagcgggcgggcggtccgccgcgaggcgagtcaccgcccgtccccgccccttgcctctcggcgccccctcgatgctcttagctgagtgtcccgcggggcccgaagcgtttactttgaaaaaattagagtgttcaaagcaggcccgagccgcctagataccgcagctaggaataatggaataggaccgcggttctattttgttggttttcggaactgaggccatgattaagagggacggccgggggcattcgtattgcgccgctagaggtgaaattcttggaccggcgcaagacggaccagagcgaaagcatttgccaagaatgttttcattaatcaagaacgaaagtcggaggttcgaagacgatcagataccgtcgtagttccgaccataaacgatgccgactggcgatgcggcggcgttattcccatgacccgccgggcagcttccgggaaaccaaagtctttgggttccggggggagtatggttgcaaagctgaaacttaaaggaattgacggaagggcaccaccaggagtgggcctgcggcttaatttgactcaacacgggaaacctcacccggcccggacacggacaggattgacagattgatagctctttctcgattccgtgggtggtggtgcatggccgttcttagttggtggagcgatttgtctggttaattccgataacgaacgagactctggcatgctaactagttacgcgacccccgagcggtcggcgtcccccaacttcttagagggacaagtggcgttcagccacccgagattgagcaataacaggtctgtgatgcccttagatgtccggggctgcacgcgcgctacactgactggctcagcgtgtgcctaccctacgccggcaggcgcgggtaacccgttgaaccccattcgtgatggggatcggggattgcaattattccccatgaacgaggaattcccagtaagtgcgggtcataagcttgcgttgattaagtccctgccctttgtacacaccgcccgtcgctactaccgattggatggtttagtgaggccctcggatcggccccgccggggtcggcccacggccttgcggagcgctgagaagacggtcgaacttgactatctagaggaagtaaaagtcgtaacaaggtttccgtaggtgaacctgcggaaggatcattaacggagaaggccgaggggggtcgtcgtcccgtccctcttg

SEQ ID NO: 3579 - DNA, 1869 bp, Mus musculus; identical to SEQ ID NO: 3577

SEQ ID NO: 3580 - DNA, 1920 bp, Rattus norvegicus; identical to SEQ ID NO: 3578

SEQ ID NO: 3581 - DNA, 1869 bp, Mus musculus; identical to SEQ ID NO: 3577

SEQ ID NO: 3582 - DNA, 1920 bp, Rattus norvegicus; identical to SEQ ID NO: 3578

SEQ ID NO: 3583 - DNA, 1846 bp, Cricetinae gen. sp.; identical to SEQ ID NO: 410
  misc_feature (1281)..(1299): n is a, c, g, or t
  misc_feature (1808)..(1823): n is a, c, g, or t

SEQ ID NO: 3584 - DNA, 1109 bp, Mus musculus
ccccgggctgtattcccctccatcgtgggccgctctaggcaccaaggtgtgatggtgggaatgggtcagaaggactcctatgtgggtgacgaggcccagagcaagagaggtatcctgaccctgaagtaccccattgaacatggcattgttaccaactgggacgacatggagaagatctggcaccacaccttctacaatgagctgcgtgtggcccctgaggagcaccctgtgctgctcaccgaggcccccctgaaccctaaggccaaccgtgaaaagatgacccagatcatgtttgagaccttcaacaccccagccatgtacgtagccatccaggctgtgctgtccctgtatgcctctggtcgtaccacgggcattgtgatggactccggtgacggggtcacccacactgtgcccatctacgagggctatgctctccctcacgccatcctgcgtctggacttggctggccgggacctgacggactacctcatgaagatcctgaccgagcgtggctacagcttcaccaccacagctgagagggaaatcgtgcgtgacatcaaagagaagctgtgctatgttgctctagacttcgagcaggagatggccactgccgcatcctcttcctccctggagaagagctatgagctgcctgacggccaagtcatcactattggcaacgagcggttccgatgccctgaggctcttttccagccttccttcttgggtatggaatcctgtggcatccatgaaactacattcaattccatcatgaagtgtgacgttgacatccgtaaagacctctatgccaacacagtgttgtctggtggtaccaccatgtacccaggcattgctgacaggatgcagaaggagattactgctctggctcctagcaccatgaagatcaagatcattgctcctcctgagcgcaagtactctgtgtggatcggtggctccatcttggcctcactgtccaccttccagcagatgtggatcagcaagcaggagtacgatgagtccggcccctccatcgtgcaccgcaagtgcttctaggcggactgttactgagctgcgttttacaccctttctttgacaaaacctaacttgcgcag

SEQ ID NO: 3585 - DNA, 4100 bp, Rattus norvegicus
  misc_feature (3859)..(3859): n is a, c, g, or t
acctcttcctcaactcacttctctctactctcacttttttttttcttcttcttttttttttttttttttttttttttttttgcaaaagaagggggtaaaaaaatgctgcactgtcgggcgaggccggtgagtgagcgagccggagccaatcagcgcccgccgttccgaaattgccttttatggctcgagtggccgctgtggcgtcctataaaacccggcggcgcaacgcgcgccactgtcgagtccgcgtccacccgcgagtacaacctccttgcagctcctccgtcccggtccacacccgccaccaggtaagcagggacgtcgggcccagcgggccccaactttaccttggccactacctcgctgcaggatcgtgaggaacactcagaagggacaccgtagaggggtggagcgtggtaccgggccgcggagcagctggcaaagcttaactttcccggcccctagggtgtagagtgtttgcagtcgtattcccgcggtgtggacactcgtgggtacgctcctgcttggtgcgcggggcttggggacacactagagtcgcggtgtgggcatttggagagccggtgcggctgcgggtgttaagccgcatctgtccaccttgaggggcaacagtattggggtcaggcgttacaatcacgctttgatggcctatgggtctttgtccaaaccggttttgccattcggcttggcgggcgcggcggggccgctcggccgggtgggggctgggatgccattgcgcgtgcgcgctctatcactgggcattggggccgtgcgcgctggggagggaactcttcctctccccctcttccgagttaagagttgcgcgtgcgtattgagactaggagcgcggccgccccgggttgggcgagggcgggccgtccaccggaaggggcggggtcgtagcggctaggcgcctgctcgcgcttcctgctgggtgtggtcgcctcccgcgcgcgcactagccgcccgtcgcctcagtgtaggcgggcctgtgcccgtttggggaggggcggaggcctggcttcctgccgtgggtccgcctccgggccagcgtttgccttttatggtaataatgcggctgtcctgcgcttcctttgtcccctgagcttgggcgcgcccctggcggctcgaggccgcggctcgccggaagtgggcagggcggcagcggctgctcttggcggctccgcggtgaccatagccctcttttgtgccttgatagttcgccatggatgacgatatcgctgcgctcgtcgtcgacaacggctccggcatgtgcaaggccggcttcgcgggcgacgatgctccccgggccgtcttcccctccatcgtgggccgccctaggcaccaggtaagtgaccctttactttgggagtggcagccctagggttttcttgggggtcgatgccagtgctgagaacgttgttctcctccgcagggtgtgatggtgggtatgggtcagaaggactcctacgtgggcgacgaggcccagagcaagagaggcatcctgaccctgaagtaccccattgaacacggcattgtaaccaactgggacgatatggagaagatttggcaccacactttctacaatgagctgcgtgtggcccctgaggagcaccctgtgctgctcaccgaggcccctctgaaccctaaggccaaccgtgaaaagatgacccaggtcagtatcctgggtgaccctccccttcttattgggtcaacttctcagcacgcccttctctaattgtctttcttctgccatgtcccataggactctcttctatgagctgagtctcccttggaactttgcagtttctgctctttcccagatgaggtcttttttttctctcgatcgcctttctgactaggtgttttaaacccctacagtgctgtgggtgtaggtactaacaatggctcgtgtgacaaagctaatgaggctggtgataaatggccttggagtgtgtattcagtagatgacagtaggtctaaatggagcccctgtcctgatactcccagcacacttaacttagctgtgttcttgccctctttgcatgtctcactcaaatctatccttacagtctcacctgccctgagtgtttcttgtggctttaggagcttgacaatactgtattcctttctctacagatcatgtttgagaccttcaacaccccagccatgtacgtagccatccaggctgtgttgtccctgtatgcctctggtcgtaccactggcattgtgatggactccggagacggggtcacccacactgtgcccatctatgagggttacgcgctccctcatgccatcctgcgtctggacctggctggccgggacctgacagactacctcatgaagatcctgaccgagcgtggctacagcttcaccaccacagctgagagggaaatcgtgcgtgacattaaagagaagctgtgctatgttgccctagacttcgagcaagagatggccactgccgcatcctcttcctccctggagaagagctatgagctgcctgacggtcaggtcatcactatcggcaatgagcggttccgatgccccgaggctctcttccagccttccttcctgggtaagttgtagtctcgtcccttctccatctaaaggtgaccaatgctggaggccacactgtaactctgatctcttgcttttcctttcaggtatggaatcctgtggcatccatgaaactacattcaattccatcatgaagtgtgacgttgacatccgtaaagacctctatgccaacacagtgctgtctggtggcaccaccatgtacccaggcatcgctgacaggatgcagaaggagattactgccctggctcctagcaccatgaagatcaaggtaagcagccttagcctggacccatagtggggtgtggtcagccctgtagttgtagccaactctcttggcttaaggaacaacccagcatccagaatgctcacaatcactgtcttgctttcttcagatcattgctcctcctgagcgcaagtactctgtgtggattggtggctctatcctggcctcactgtccaccttccagcagatgtggatcagcaagcaggagtacgatgagtccggcccctccatcgtgcaccgcaaatgcttctaggcggactgttactgagctgcgttttacaccctttctttgacaaaacctaacttgcgcagaaaaaaaaaatgagacatttggcatggctttattgtttttttgttttttgtttttgttttttttaaattttttttttaaaaaggttttttttttttgttttgttttggcgcttttgactcaaggatttaaaaactggaacggtgaaggcgaccgcagttggttggagcaaacatcccccaaagttctacaatgtggctgaggactttgattgtacattgttttttgtttttggtttttttaatagtcactccaagtatccacggcatagatggttacaggaagtccctcaccctcccaaaagccacccccaactcctaaggggaggatggctgcatccatgccctgagtccacaccgggaaggtgacagcattgcttctgtgtaaattatgtacttgcaaacatttttttaaatcttccgccttaatacttcatttttgtttttaatttctgaatggtcagccattcgtggcctgccccttttttttgtccccccaacttgatgtatgaaggctttggtctccctgggagtggtttgaggtgttgaggcgccagggctggcctgtacactgacgtgagaccgttttaataaaagtgcacaccttacaaacaagtttgtggctctgtggcttctactgggtgtggggagcaggctgggtgggtgtgnaactccacgtgggggaggggcaatttagggtgggctggccttgcctgatagctagtgggagggctaaaggatcatgatctttaatgaggtctcataaataccccaccttcggtcttgagggagggtgaggagttgggaaggtatctccctgacacctggccaagctggcctcatcaaccctactttcctcagccagggggaggtccacatcctcccacctgcatagcttgcgtctagaggc

SEQ ID NO: 3586 - DNA, 1846 bp, Cricetinae gen. sp.; identical to SEQ ID NO: 410
  misc_feature (1281)..(1299): n is a, c, g, or t
  misc_feature (1808)..(1823): n is a, c, g, or t

SEQ ID NO: 3587 - DNA, 1109 bp, Mus musculus; identical to SEQ ID NO: 3584

SEQ ID NO: 3588 - DNA, 4100 bp, Rattus norvegicus; identical to SEQ ID NO: 3585
  misc_feature (3859)..(3859): n is a, c, g, or t

SEQ ID NO: 3589 - DNA, 1846 bp, Cricetinae gen. sp.; identical to SEQ ID NO: 410
  misc_feature (1281)..(1299): n is a, c, g, or t
  misc_feature (1808)..(1823): n is a, c, g, or t

SEQ ID NO: 3590 - DNA, 1109 bp, Mus musculus; identical to SEQ ID NO: 3584

SEQ ID NO: 3591 - DNA, 4100 bp, Rattus norvegicus; identical to SEQ ID NO: 3585
  misc_feature (3859)..(3859): n is a, c, g, or t

SEQ ID NO: 3592 - DNA, 1049 bp, Escherichia coli
atggctcaccgcccacgctggacattgtcgcaagtcacagaattatttgaaaaaccgttgctggatctgctgtttgaagcgcagcaggtgcatcgccagcatttcgatcctcgtcaggtgcaggtcagcacgttgctgtcgattaagaccggagcttgtccggaagattgcaaatactgcccgcaaagctcgcgctacaaaaccgggctggaagccgagcggttgatggaagttgaacaggtgctggagtcggcgcgcaaagcgaaagcggcaggatcgacgcgcttctgtatgggcgcggcgtggaagaatccccacgaacgcgatatgccgtacctggaacaaatggtgcagggggtaaaagcgatggggctggaggcgtgtatgacgctgggcacgttgagtgaatctcaggcgcagcgcctcgcgaacgccgggctggattactacaaccacaacctggacacctcgccggagttttacggcaatatcatcaccacacgcacttatcaggaacgcctcgatacgctggaaaaagtgcgcgatgccgggatcaaagtctgttctggcggcattgtgggcttaggcgaaacggtaaaagatcgcgccggattattgctgcaactggcaaacctgccgacgccgccggaaagcgtgccaatcaacatgctggtgaaggtgaaaggcacgccgcttgccgataacgatgatgtcgatgcctttgattttattcgcaccattgcggtcgcgcggatcatgatgccaacctcttacgtgcgcctttctgccggacgcgagcagatgaacgaacagactcaggcgatgtgctttatggcaggcgcaaactcgattttctacggttgcaaactgctgaccacgccgaatccggaagaagataaagacctgcaactgttccgcaaactggggctaaatccgcagcaaactgccgtgctggcaggggataacgaacaacagcaacgtcttgaacaggcgctgatgaccccggacaccgacgaatattacaacgcggcagcattatgagctggcag

SEQ ID NO: 3593 - DNA, 1049 bp, Escherichia coli; identical to SEQ ID NO: 3592

SEQ ID NO: 3594 - DNA, 1049 bp, Escherichia coli; identical to SEQ ID NO: 3592

SEQ ID NO: 3595 - DNA, 751 bp, Escherichia coli
atggcaacggttaataaacaagccattgcagcggcatttggtcgggcagccgcacactatgagcaacatgcagatctacagcgccagagtgctgacgccttactggcaatgcttccacagcgtaaatacacccacgtactggacgcgggttgtggacctggctggatgagccgccactggcgggaacgtcacgcgcaggtgacggccttagatctctcgccgccaatgcttgttcaggcacgccagaaggatgccgcagaccattatctggcgggagatatcgaatccctgccgttagcgactgcgacgttcgatcttgcatggagcaatctcgcagtgcagtggtgcggtaatttatccacggcactccgcgagctgtatcgggtggtgcgccccaaaggcgtggtcgcgtttaccacgctggtgcagggatcgttacccgaactgcatcaggcgtggcaggcggtggacgagcgtccgcatgctaatcgctttttaccgccagatgaaatcgaacagtcgctgaacggcgtgcattatcaacatcatattcagcccatcacgctgtggtttgatgatgcgctcagtgccatgcgttcgctgaaaggcatcggtgccacgcatcttcatgaagggcgcgacccgcgaatattaacgcgttcgcagttgcagcgattgcaactggcctggccgcaacagcaggggcgatatcctctgacgtatcatctttttttgggagtgattgctcgtg

SEQ ID NO: 3596 - DNA, 751 bp, Escherichia coli; identical to SEQ ID NO: 3595

SEQ ID NO: 3597 - DNA, 661 bp, Escherichia coli
gtgagtaaacgttattttgtcaccggaacggataccgaagtggggaaaactgtcgccagttgtgcacttttacaagccgcaaaggcagcaggctaccggacggcaggttataaaccggtcgcctctggcagcgaaaagaccccggaaggtttacgcaatagcgacgcgctggcgttacagcgcaacagcagcctgcagctggattacgcaacagtaaatccttacaccttcgcagaacccacttcgccgcacatcatcagcgcgcaagagggcagaccgatagaatcattggtaatgagcgccggattacgcgcgcttgaacaacaggctgactgggtgttagtggaaggtgctggcggctggtttacgccgctttctgacactttcacttttgcagattgggtaacacaggaacaactgccggtgatactggtagttggtgtgaaactcggctgtattaatcacgcgatgttgactgcacaggtaatacaacacgccggactgactctggcgggttgggtggcgaacgatgttacgcctccgggaaaacgtcacgctgaatatatgaccacgctcacccgcatgattcccgcgccgctgctgggagagatcccctggcttgcagaaaatccagaaaatgcggcaaccggaaagtacataa

SEQ ID NO: 3598 - DNA, 661 bp, Escherichia coli; identical to SEQ ID NO: 3597

SEQ ID NO: 3599 - DNA, 1032 bp, Enterobacteria phage P1
atgtccaatttactgaccgtacaccaaaatttgcctgcattaccggtcgatgcaacgagtgatgaggttcgcaagaacctgatggacatgttcagggatcgccaggcgttttctgagcatacctggaaaatgcttctgtccgtttgccggtcgtgggcggcatggtgcaagttgaataaccggaaatggtttcccgcagaacctgaagatgttcgcgattatcttctatatcttcaggcgcgcggtctggcagtaaaaactatccagcaacatttgggccagctaaacatgcttcatcgtcggtccgggctgccacgaccaagtgacagcaatgctgtttcactggttatgcggcggatccgaaaagaaaacgttgatgccggtgaacgtgcaaaacaggctctagcgttcgaacgcactgatttcgaccaggttcgttcactcatggaaaatagcgatcgctgccaggatatacgtaatctggcatttctggggattgcttataacaccctgttacgtatagccgaaattgccaggatcagggttaaagatatctcacgtactgacggtgggagaatgttaatccatattggcagaacgaaaacgctggttagcaccgcaggtgtagagaaggcacttagcctgggggtaactaaactggtcgagcgatggatttccgtctctggtgtagctgatgatccgaataactacctgttttgccgggtcagaaaaaatggtgttgccgcgccatctgccaccagccagctatcaactcgcgccctggaagggatttttgaagcaactcatcgattgatttacggcgctaaggatgactctggtcagagatacctggcctggtctggacacagtgcccgtgtcggagccgcgcgagatatggcccgcgctggagtttcaataccggagatcatgcaagctggtggctggaccaatgtaaatattgtcatgaactatatccgtaacctggatagtgaaacaggggcaatggtgcgcctgctggaagatgccgattag

SEQ ID NO: 3600 - DNA, 1032 bp, Enterobacteria phage P1; identical to SEQ ID NO: 3599

SEQ ID NO: 3601 - DNA, 1840 bp, Bacillus subtilis
atgtcaaacgaaacaattaaattagtcattgcgggaccgcgtggaagaatggggcaggaagctgttaaattggcagaacgaacaccacattttgaccttgtaggggccatagaccatacatacgatcagcaaaaattatctgatgtgatgcctgttgagtcagatgctttcatttacacagatatccatgcctgttttacagaaacacaaccggatgtcttgattgatttaacaacgcccgaaatcggaaaagtacatacaaaaattgcattagagcacggagtccgtccagttgtcggaacaaccggtttctcagaagctgatttaaaagagctcacatctttaacagaagaaaaagggatcggagccatcatcgcgccaaattttgcgctcggtgcgatactgatgatgaaattttcaaaaatggctgccaactattttgaggatgttgagattattgagcttcatcatgaccagaagcttgacgcaccaagcggaactgcgcttaaaacagcggaaatgatttcagaagtccgtaaagaaaagcagcaaggacatccggatgaaaaagaaattctcccaggagcaagaggagcggagcaaaacggtattcgcttgcacaggcttcagatacgccatgattcttataaccgtgcttctttcatgtcaggcgttaaactgtcagtcgaacaagtcatgaagattgatcagcttgtgtatggtttagaaaatatcattgattagacggggggataaacaatgaaaattgctttgatcgcgcatgacaagaaaaaacaggatatggttcaatttacgactgcctatcgggatattttaaagaatcatgatctatacgcaaccggaaccacagggttgaaaattcatgaggcgacaggtcttcaaattgaacgttttcaatccggccctttagggggagaccagcaaatcggtgcactgatcgctgccaatgcactcgatcttgtcatttttttgcgcgacccgctgaccgcgcagccgcatgaaccggatgtctcggcattaatccgtttatgtgatgtgtattccattccgctcgccacaaatatgggtactgcggaaattcttgtgcgcacacttgatgaaggtgttttcgaattccgtgaccttcttcggggagaagagccgaatgtataatgctgacgttcttgcttttggcgcccacagtgatgatgtcgagatcggaatgggcggcacaatagcgaagtttgtcaaacaggaaaaaaaagtaatgatatgcgatttgacagaagcggaactctcttctaacggtacggtcagtttgcgtaaagaagaagcagctgaagcagcccgcatattaggcgcagataaaagaattcagctaacgcttccagaccgcggcctaataatgagtgatcaggcaattcggtcaattgtcactgtcatcagaatctgtcggccaaaagcggtttttatgccgtataaaaaggatcgccatccggatcacggcaatgcggctgcactggtggaagaagcgatcttttccgccggaatccataaatataaagacgaaaaaagccttccggcgcataaagtcagcaaggtttactattatatgataaatggttttcatcagccggattttgttattgatatctcggatacaatagaggcaaagaaacaaagcctcaacgcctacaaaagccagtttatcccgtcaaaggattccgtttctactcctctgacgaatgggtatattgaaatcgttgaagcgagagaaaagctttacggtaaagaagcgggcgtggagtatgccgaagtttcttttccaaacggatgctga

SEQ ID NO: 3602 - DNA, 1840 bp, Bacillus subtilis; identical to SEQ ID NO: 3601

SEQ ID NO: 3603 - DNA, 1840 bp, Bacillus subtilis; identical to SEQ ID NO: 3601

SEQ ID NO: 3604 - DNA, 1266 bp, Cricetus cricetus
ggctctctgctcctccctgttctagagacagccgcatctttccgtgcagtgccagcctcgctccggagacgcaatggtgaaggtcggcgtgaacggatttggccgtattggacgcctggttaccagggctgccttcacttctggcaaagtggaagttgttgccatcaatgaccccttcattgacctcaactacatggtctacatgttccagtatgactctacccatggcaagttcaaaggcacagtcaaggctgagaatggaaagcttgtcatcaacgggaaggccatcaccatcttccaggagcgagatcccgccaacatcaaatggggtgatgctggcgccgagtatgttgtggaatctactggcgtcttcaccaccatggagaaggctggggcccacttgaagggcggggccaagagggtcatcatctccgccccttctgctgatgcccccatgtttgtgatgggtgtgaaccaagacaagtatgacaactccctcaagattgtcagcaatgcgtcctgcaccaccaactgcttagcccccctggccaaggtcatccatgacaactttggcattgtggaaggactcatgaccacggtccatgccatcactgccacccagaagactgtggatggcccctccggaaagctgtggcgtgatggccgtggggctgcccagaacatcatccctgcatccactggcgctgccaaggctgtgggcaaagtcatcccagagctgaacgggaagctgactggcatggccttccgtgttcctacccccaacgtgtccgttgtggatctgacatgtcgcctggagaaacctgccaagtatgaggacatcaagaaggtggtgaagcaggcatctgagggcccactgaagggcatcctgggctacaccgaggaccaggttgtctcctgcgacttcaacagtgactcccactcttccacctttgatgctggggctggcattgctctcaatgacaactttgtaaagctcatttcctggtatgacaatgaatttggctacagcaacagagtggtggacctcatggcctacatggcctccaaggagtaagaagcccaccctggaccatccaccccagcaaggactcgagcaagagggaggccctggctgctgagcagtccctgtccaataacccccacaccgatcatctccctcacagtttccatcccagacccccagaataaggaggggcttagggagccctactctcttgaataccatcaataaagttcactgcaccc

SEQ ID NO: 3605 - DNA, 1228 bp, Mus musculus
acagccgcatcttcttgtgcagtgccagcctcgtcccgtagacaaaatggtgaaggtcggtgtgaacggatttggccgtattgggcgcctggtcaccagggctgccatttgcagtggcaaagtggagattgttgccatcaacgaccccttcattgacctcaactacatggtctacatgttccagtatgactccactcacggcaaattcaacggcacagtcaaggccgagaatgggaagcttgtcatcaacgggaagcccatcaccatcttccaggagcgagaccccactaacatcaaatggggtgaggccggtgctgagtatgtcgtggagtctactggtgtcttcaccaccatggagaaggccggggcccacttgaagggtggagccaaacgggtcatcatctccgccccttctgccgatgcccccatgtttgtgatgggtgtgaaccacgagaaatatgacaactcactcaagattgtcagcaatgcatcctgcaccaccaactgcttagcccccctggccaaggtcatccatgacaactttggcattgtggaagggctcatgaccacagtccatgccatcactgccacccagaagactgtggatggcccctctggaaagctgtggcgtgatggccgtggggctgcccagaacatcatccctgcatccactggtgctgccaaggctgtgggcaaggtcatcccagagctgaacgggaagctcactggcatggccttccgtgttcctacccccaatgtgtccgtcgtggatctgacgtgccgcctggagaaacctgccaagtatgatgacatcaagaaggtggtgaagcaggcatctgagggcccactgaagggcatcttgggctacactgaggaccaggttgtctcctgcgacttcaacagcaactcccactcttccaccttcgatgccggggctggcattgctctcaatgacaactttgtcaagctcatttcctggtatgacaatgaatacggctacagcaacagggtggtggacctcatggcctacatggcctccaaggagtaagaaaccctggaccacccaccccagcaaggacactgagcaagagaggccctatcccaactcggcccccaacactgagcatctccctcacaatttccatcccagacccccataataacaggaggggcctagggagccctccctactctcttgaataccatcaataaagttcgctgcacccac

SEQ ID NO: 3606 - DNA, 1233 bp, Rattus norvegicus
ggtcagtgccggcctcgtctcatagacaagatggtgaaggtcggtgtcaacggatttggccgtattggccgcctggtcaccagggctgccttctcttgtgacaaagtggacattgttgccatcaacgaccccttcattgacctcaactacatggtctacatgttccagtatgattctacccacggcaagttcaatggcacagtcaaggctgagaatgggaagctggtcatcaatgggaaacccatcaccatcttccaggagcgcgatcccgctaacatcaaatggggtgatgctggtgctgagtatgtcgtggagtctactggcgtcttcaccaccatggagaaggctggggctcacctgaagggtggtgccaaaagggtcatcatctccgccccttccgctgatgcccccatgtttgtgatgggtgtgaaccacgagaaatatgacaactccctcaagattgtcagcaatgcatcctgcaccaccaactgcttagcccccctggccaaggtcatccatgacaactttggcatcgtggaagggctcatgaccacagtccatgccatcactgccactcagaagactgtggatggcccctctggaaagctgtggcgtgatggccgtggggcagcccagaacatcatccctgcatccactggtgctgccaaggctgtgggcaaggtcatcccagagctgaacgggaagctcactggcatggccttccgtgttcctacccccaatgtatccgttgtggatctgacatgccgcctggagaaacctgccaagtatgatgacatcaagaaggtggtgaagcaggcggccgagggcccactaaagggcatcctgggctacactgaggaccaggttgtctcctgtgacttcaacagcaactcccattcctccacctttgatgctggggctggcattgctctcaatgacaactttgtgaagctcatttcctggtatgacaatgaatatggctacagcaacagggtggtggacctcatggcctacatggcctccaaggagtaagaaacccctggaccacccagcccagcaaggatactgagagcaagagagaggccctcagttgcctgagagtccccatcccaactcagcccccaacactgagcactctccctcacaattccatcccagaccccataacaacaggaggggcctggggagccctcccttctctcgaataccatcaataaagttcgctgcaccctc

SEQ ID NO: 3607 - DNA, 1266 bp, Cricetus cricetus; identical to SEQ ID NO: 3604

SEQ ID NO: 3608 - DNA, 1228 bp, Mus musculus; identical to SEQ ID NO: 3605

SEQ ID NO: 3609 - DNA, 1233 bp, Rattus norvegicus; identical to SEQ ID NO: 3606

SEQ ID NO: 3610 - DNA, 1266 bp, Cricetus cricetus; identical to SEQ ID NO: 3604

SEQ ID NO: 3611 - DNA, 1228 bp, Mus musculus; identical to SEQ ID NO: 3605

SEQ ID NO: 3612 - DNA, 1233 bp, Rattus norvegicus; identical to SEQ ID NO: 3606

SEQ ID NO: 3613 - DNA, 984 bp, Bacillus subtilis
atgacattgttcttacacggcacaagcagacaaaatcaacatggtcatttagaaatcggaggtgtggatgctctctatttagcggagaaatatggtacacctctttacgtatatgatgtggctttaatacgtgagcgtgctaaaagctttaagcaggcgtttatttctgcagggctgaaagcacaggtggcatatgcgagcaaagcattctcatcagtcgcaatgattcagctcgctgaggaagagggactttctttagatgtcgtatccggagagagctatatacggctgttgcagcaggctttccggcagaacgcatccactttcatggaaacaataagagcagggaagaactgcggatggcgcttgagcaccgcatcggctgcattgtggtggataatttctatgaaatcgtcgcttcttgaagacctatgtaaagaaacgggtcactccatcgatgttcttcttcggatcacgcccggagtagaagcgcatacgcatgactacattacaacgggccaggaagattcaaagtttggtttcgatcttcataacggacaaactgaacgggccattgaacaagtattacaatcggaacacattcagctgctgggtgtccattgccatatcggctcgcaaatctttgatacggccggttttgtgttagcagcggaaaaaatcttcaaaaaactagacgaatggagagattcatattcatttgtatccaaggtgctgaatcttggaggaggtttcggcattcgttatacggaagatgatgaaccgcttcatgccactgaatacgttgaaaaaattatcgaagctgtgaaagaaaatgcttcccgttacggttttgacattccggaaatttggatcgaaccgggccgttctctcgtgggagacgcaggcacaactctttatacggttggctctcaaaaagaagtggataagctgtacaatcgtttcatcattcggcgtgcgaattaa

SEQ ID NO: 3614 - DNA, 984 bp, Bacillus subtilis; identical to SEQ ID NO: 3613

SEQ ID NO: 3615 - DNA, 984 bp, Bacillus subtilis; identical to SEQ ID NO: 3613

SEQ ID NO: 3616 - DNA, 1318 bp, Bacillus subtilis
atgaaagaggagacattttatcttgtccgtgaagatgtattgcccgatgcaatgagaaaaacattagaagtcaaaaagctgcttgatcgaaaaaaagcagattcagtagcagatgccgttcaaaaggtcgatttaagtagaagtgcgttttataaatacagggatgctgtttttccattctacaccatggtaaaagaacaaattatcacacttttctttcatttggaggataggtcaggtgcgttatctcagcttcttcaggcggtagctgattctggaagcaacgttctttccattcaccagaccattccgcttcaaggcagagcaaatgtgacactgtctatcagtacgtcggcaatggaagaagacattcatacattaatgaataagctcaggaagtttgattttgtagaaaaggttgaaatattaggttcaggtgcataagggagagaaaatcgtcatgaaagtcggttatttaggtccagcagctacatttacacatctagcagtcagttcttgttttcaaaacggcgccgaacatgttgcttaccgcaccattccggagtgtatagatgcagccgttgcaggcgaagttgattttgcttttgttcctttggaaaatgctttagaaggatctgttaatctaacaatagactatttaatacatgaacagcctttgccaatcgtgggtgaaatgacgttgccgattcaccagcacttgctcgtccatccctcaagagagaatgcatggaaagagctcgacaaaatttactcacattcacacgcgattgcgcaatgccataaatttcttcatcgacattttccttccgttccatatgaatacgccaattctaccggggcggcagcaaagtttgtcagtgaccatcccgagctgaatatcggggtcattgccaatgatatggcagcttctacatacgaattaaaaatcgtgaaacgggatatacaggattatagggacaatcatacaagatttgttatcctgtctcccgatgaaaacatatcttttgaagtgaattcaaaattgagctctaggcccaaaacgaccttaatggtcatgctgccgcaggatgatcagtccggggcgctgcatagagtgctgtctgcattttcttggagaaatttaaacctgtcaaaaattgagtcacgtccgactaaaaccggattaggccattatttctttattattgatattgagaaagcgtttgatgatgtattgattccaggggccatgcaggagcttgaagcactcggctgcaaagtgaggcttctgggtgcataccagtcttaccaattataa

SEQ ID NO: 3617 - DNA, 1318 bp, Bacillus subtilis; identical to SEQ ID NO: 3616

SEQ ID NO: 3618 - DNA, 1318 bp, Bacillus subtilis; identical to SEQ ID NO: 3616

SEQ ID NO: 3619 - DNA, 4067 bp, Mus musculus
ccctgctggaggcctgggcctcgggtggagcagttactgcctgtggatcctctatcacgtcctctgtgtgcagcacacctaggtgcttggctggtacaagatgctgaagttccaaacagttcgagggggcctgaggctcctgggtgtccgccgatcctcctcggcccctgttgcctccccaaatgtccggcgtctggagtataagcctatcaagaaagtaatggtggccaacagaggtgagattgccatccgagtgtttcgtgcgtgcacagagctgggtatccgcacagtggctgtctactcggagcaggacacagggcagatgcacaggcagaaagctgatgaagcctaccttattggccgtggcctggcacctgtgcaggcctacctgcacattccagacatcatcaaggtggccaaggaaaatggtgtagatgcggtgcatcctggctatgggttcctctcagagcgagcagactttgcccaggcctgccaagatgctggagtccggttcattggtccaagcccagaggtggtccgcaagatgggagacaaggtggaagcccgggccattgccatcgctgcaggcgttccagtggtccccggcacggactcccccatcagctccctgcacgaggcgcatgagttctccaacaccttcggcttccctattatcttcaaggccgcctacggaggtgggggccgcggcatgcgggtcgtgcatagctatgaggagttggaagagaattacacccgggcctactccgaggccttggcagcctttgggaatggagcgttgtttgtggagaagttcattgagaagccaaggcacattgaggtgcagatcctaggggaccagtatgggaacatcctgcacctgtacgagcgagactgctccatccagcgtcggcaccagaaggtggtagagatcgcccctgctacccacctggatccccaacttcgctcacgtctcaccagtgactctgtcaaacttgccaagcaggtaggctatgagaacgccggcactgtggagttcctggtggacaagcacggcaagcactacttcatcgaggtcaattcccgcctgcaggtggagcacacggtcaccgaggagatcacagatgtggacctggtccatgctcagatccacgtgtccgaaggccggagcctgcctgacctgggcctgcggcaggagaacatccgcatcaatggctgtgccattcagtgtcgggtcaccaccgaggaccctgcacgcagcttccagccagacaccggccgcattgaggttttccggagtggtgagggcatgggcatccgcctggacaacgcctctgcattccagggcgctgtcatatcgccccactatgactctctgctcgtcaaggtcattgcacacggcaaagaccaccccacagctgccaccaagatgagcagagccctggccgagttccgtgtccgaggtgtaaagaccaacatccccttcctgcagaatgttctcaacaaccagcagttcctggcaggcacagtggacacccagttcatcgatgagaaccctgagctgttccagcttcggcctgcacagaaccgggcccagaagttgctacattacctcggacatgtcatggtgaatggccctaccactccaatccctgtcaatgtgagccccagtcctgtggatcctgctgttcctgtggtgcccataggcccacctccagctggtttcagggacatccttctgcgagaagggccagagggctttgcccgagctgtgcggaatcaccaggggctgctgttgatggacacaaccttccgggatgcccaccagtcactgctggccactagagtgcgcacacatgatctcaaaaagattgcgccctatgttgcccacaacttcaacaagctcttcagcatggagaactggggaggcgccacgttcgacgttgccatgcgcttcctgtacgagtgcccctggcggcggctccaggagctccgggagcttatcccgaacatcccgttccagatgctactgaggggggccaatgctgtgggctacaccaactaccctgacaacgtggtcttcaagttctgtgaggtggccaaagagaatggtatggacgtcttccgagtctttgactccctcaactacttgccaaacatgctgctgggcatggaagcagcaggcagtgctgggggtgtggtggaggctgccatctcatacacgggggacgtggctgaccctagtcgcactaaatactcactggagtactacatgggcttagctgaagaactggtgcgagctggcactcacatcctgtgcattaaggacatggcgggcctgctgaagcctgccgcctgcaccatgctggtcagctccctccgggaccgattccccgacctcccactgcacatccatacccatgatacatcaggggcaggtgtggcagccatgctggcctgtgcacaagcaggggctgatgttgtggacgtggcagtagactccatgtctgggatgacctcacagccaagcatgggggccctggtggcctgtaccaaagggactcctttggacacagaggtacccctggagcgtgtgtttgactacagtgagtactgggaaggggctcggggactgtacgcagccttcgattgcacggctaccatgaagtctggcaactccgacgtgtatgagaatgagattccagggggccagtacaccaacctgcacttccaggcccatagcatggggcttggctccaagttcaaggaggtcaagaaggcctatgtggaggctaaccagatgctgggggacctcatcaaggtgacaccatcctccaagattgtgggggacctggcccagttcatggtgcagaatgggttgagccgggcagaggcagaagctcaggcagaagagctgtccttcccccgctctgtggtggagttcctgcagggctacattggcattccccatgggggtttccctgagccctttcgctctaaggtgctaaaggacctgccaagaatagaggggcggcctggagcctccctccctcccctgaacctgaaggagctggagaaggacctgattgataggcatggggaggaggtgaccccagaggacgtcctctctgcagccatgtaccctgatgtctttgctcaattcaaagacttcacggctaccttcggccccctggatagccttaatactcgtctctttcttcaaggacccaaaattgcagaggagtttgaggttgagctggaacggggcaagaccctgcacatcaaagccctggctgtaagcgacctgaaccgtgctggccagaggcaggtgttctttgaactcaatgggcagcttcgatccattctggttaaagacacccaggccatgaaggagatgcacttccatcccaaggctttgaaggatgtgaagggccaaattggggccccgatgcctgggaaggtcatagacatcaaggtggcagcaggggacaaggtggctaagggccagcccctctgtgtgctcagcgccatgaagatggagactgtggtgacttcgcccatggagggcactatccgaaaggttcatgttaccaaggacatgactctggaaggcgacgacctcatcctagagattgagtgatcttactccagcctggcagcctggccgaccctaccccaagcctctcaacagaagctgtgcagccagggcaggcccaggccagccagtacctgagagtaggaaggccaggcccttgaggtcctgtcccatgggacagcacacacactacctgcaatggcctgcccattcccttcagctatttgtccttttcttactggcaggtagttgctcacatattcatctcttgccaaataagggcctgctcctcgtgggagaccacaggtgtacagtcggtggccttgtacctgggggaggtggcttagggcttctacctctgggggtagagggaagacctaattcacaggtcctgggaaatttgctcaataaaagtggccttcccttgccctccacactaggtcatgtacagtctaaaaaaaaaaaaaaaaaaaaa

SEQ ID NO: 3620 - DNA, 3945 bp, Rattus norvegicus
cgcggcggccacggcttgaggcgacggggcgaagatgctgaagttccaaacagttcgagggggcctgaggctcctgggtgtccgccgatcctccacagcccccgttgcctccccaaatgtccggcgtctggagtacaagcccatcaagaaagtaatggtggccaacagaggtgagattgccatccgagtgtttcgtgcctgcacagagctgggtatccgcacagtggctgtctactcggagcaggacacaggccagatgcaccggcagaaagctgatgaagcctaccttattggccgtgggctggctcctgtgcaagcctacctgcacattccagacatcattaaggtggccaaggagaatggtgtagatgctgtgcaccctggctatgggttcctctcagagagagcagactttgcccaggcctgccaagatgctggagtccgattcattggtccaagcccagaggtggtccgcaagatgggagacaaggtggaagcccgggccattgccattgctgcaggcgttccagtggtccctggcactaattcccccatcaattccctgcatgaggcacacgagttctctaacacctatggtttccctattatcttcaaggctgcctatggaggtgggggccgtggcatgagggttgtgcatagctacgaggagctggaagagaattacacccgggcctaccctgaggccttggcagcctttgggaatggggcattgtttgtggagaaattcattgagaagccaagacacattgaggtgcagatcctaggggaccaatatgggaacatcttgcacttgtatgagcgggactgctccatccagcggcggcaccagaaggtggtagagattgcccctgctacccacctggacccccaacttcggtcacgcctcaccagtgactctgtcaaacttgccaagcaggttggctatgagaatgcaggcactgtggagttcctggtggacaagcatggcaagcactacttcatcgaggtcaattcccgcctgcaggtggagcacacggtcactgaggagattacagatgtggacctggtccatgctcagatccatgtgtccgaaggccggagcctgcctgacctaggcctgcggcaggaaaacatccgaatcaatggttgtgccattcagtgtcgggtcaccactgaggaccctgcacgcagcttccagccagacactggccgcattgaggttttccggagtggtgagggcatgggcatccgcctggacaatgcctcagcattccagggagctgtcatatccccccactatgactccctgctcgtcaaagtcattgcccatggcaaagaccaccctacagctgccaccaagatgagcagagccctggcggagttccgtgtccgaggtgtaaagaccaacatccccttcctgcagaatgtgctcaacaaccagcagttcctagcgggcattgtggacacccagttcatcgatgagaaccccgagctgttccagctgcggcctgcacagaaccgggcccagaagttgctacattaccttggacacgtcatggtcaatggccctaccactccaatccccgtcaaggtcagtcccagccctgtggaccccattgttcctgtggtgcccataggcccacccccagctggtttcagagacatccttctgcgagaggggccagagggctttgccagagctgtgcggaatcaccaggggctgctgctaatggacacaaccttccgggatgcccaccagtcactacttgccactagagtgcgcacacacgatctcaaaaagattgcaccctacgttgcccacaacttcaacaacctcttcagcatagagaactggggaggagccacatttgacgtggccatgcgcttcttgtatgagtgcccctggcggcggctccaggagctccgggagctcatccccaacatcccattccagatgctactgaggggggccaatgctgtgggctacaccaactaccctgacaacgtggtcttcaagttctgtgaggtggccaaagagaatggcatggacgtcttccggatctttgactcccttaactacctgccaaacatgctgctgggcatggaagcagctggcagtgctgggggtgtggtggaagctgccatctcctacacgggtgacgtggctgaccccagtcgcactaaatactcactggagtactacatgggcttagctgaagaactggtgcgagccggcactcacatcctctgcattaaggacatggcaggcctgctgaagcctgcagcatgcaccatgctggtcagctccctccgggaccggttccccgacctcccactgcacatccatacccatgacacatcagggtcaggtgtggcagccatgttggcctgtgcacaagctggggctgatgttgtggatgtggcagtcgactctatgtctgggatgacctcacagcccagcatgggggccctggtggcctgtaccaaagggactcctctggacacagaggtacccctggagcgtgtgtttgactacagtgagtattgggaaggggctcgggggctgtatgcagcctttgattgcacggctaccatgaagtctggcaactcagacgtgtatgagaatgaggatccagggggccagtacaccaacctacacttccaggcccacagcatgggacttggctccaagttcaaggaggtcaagaaggcctatgtggaggctaaccagatgctgggggacctcatcaaggtgacaccatcctccaagattgtgggggatctggcccagttcatggtgcagaacgggttgagccgggcagaggcagaagctcaggcagaagagctgtccttcccccgctctgtggtggagttcctgcagggctacattggcattccccatgggggtttccctgaacccttccgttctaaggtgctaaaggacctgccaaggatagaaggagggcctggagcctccctccctcccttgaacctgaaggagctggagaaggacctgattgataggcatggagaggaggtgaccccagaggacgttctctctgcagccatgtaccctgatgtctttgctcagttcaaagacttcacggctacctttggccccctggatagcctgaatactcgtctctttcttcaaggacccaaaattgcagaggagtttgaggttgagctggaacggggcaagaccttgcacatcaaagccctggctgtaagcgacctgaaccgtgctggccagaggcaggtgttctttgaactcaatgggcagcttcgatccattctggttaaagacacccaggccatgaaggagatgcacttccatcccaaggccttgaaggatgtgaagggccaaattggggcccctatgcctgggaaggtcatagacgtcaaggtggcagcaggagccaaggtggttaagggccagcccctctgtgtgctcagcgccatgaagatggagactgtggtgacttcgcccatggagggcactatccgaaaggttcacgtgaccaaggacatgactctggaaggcgatgacctcatcctagagattgagtgatcttactccagactggcagcctggccaaccctaccccaagcctctcaacagaagctgtgcagccagggcaggcccaggcagtacctgagggctaggccttgaggtcctgtcccatgggacagcacacacactacctgcaatggccctcccattcccttcagctatttgtccttgtcttgctggcaggcagttctcacatattcatctcttgccaaataagggtctgctcctcgtgggagaccacaggtgtacagtaggtggccttgtacctgggagaggggttctacctctgggggtagagggaagaagacctaattcataggtcctgggaaatttgctcaataaaagtggccttcccttgccctccacaaaaa

SEQ ID NO: 3621 - DNA, 4067 bp, Mus musculus; identical to SEQ ID NO: 3619

SEQ ID NO: 3622 - DNA, 3945 bp, Rattus norvegicus; identical to SEQ ID NO: 3620

SEQ ID NO: 3623 - DNA, 4067 bp, Mus musculus; identical to SEQ ID NO: 3619

SEQ ID NO: 3624 - DNA, 3945 bp, Rattus norvegicus; identical to SEQ ID NO: 3620

SEQ ID NO: 3625 - DNA, 600 bp, Cricetulus griseus
tcgacccacgcgtccgctggggctgatgttgtggatgtggcagtaaactccatgtctgggatgacttcacagcccacatgggtgccctggtggcttgtaccaaagggactcctctgaacacagaggtgcccctggagcgtgtgtttgactacagtgaatactgggaaggggctcggggcctgtatgcggcctttgactgcacggctaccatgaagtctggcaactcaaatgtgtatgaaaatgaaatcccagggggccagtacaccaacctacacttccaggcccacagcatggggcttggctccaagttcaaggaggtcaaaaaggcctatgtggaggctaaccaaatgctgggggacctcatcaaggtgacaccatcctccaagattgtgggggacctggcccagttcatggtgcaaaatgggttaagccgagcagaggctgaagctcaggcaaaagagctgtccttccctcgctctgtggtggaattcctgcagggctacattggaattccccatggaggcttccctgagcccttccgctctaaggtgctaaaggacctgccaagattagaggggaggcctggagcctcccttcctc

SEQ ID NO: 3626 - DNA, 4067 bp, Mus musculus; identical to SEQ ID NO: 3619

SEQ ID NO: 3627 - DNA, 3945 bp, Rattus norvegicus; identical to SEQ ID NO: 3620

SEQ ID NO: 3628 - DNA, 1982 bp, Bacillus subtilis
atgtggaaaggacttatccatcaatataaagaatttttacctgtaacagatcaaacaccggcgctaactttacatgaaggaaacacacctcttattcacctgccgaagctgtctgagcagctcggaattgagcttcatgtcaaaacggaaggcgtcaatcctacgggatcatttaaagatcgcggaatggttatggctgtggcaaaggcaaaagaagaaggcaatgacacgattatgtgcgcgtcaacaggtaacacttccgctgctgcggcagcatatgcagcccgtgctaacatgaaatgcattgtcatcatcccgaacggaaaaattgcatttggaaaactcgctcaagctgtcatgtacggagccgagattatcgcaattgacggaaactttgacgatgcgcttaaaattgtccgttccatctgtgagaaatcaccgattgcccttgtcaactcagtcaacccttaccgcattgaaggccaaaaaactgctgccttcgaagtgtgcgaacagctgggggaagcgcctgatgttttagcgatcccggtcggaaatgctggaaacatcactgcgtactggaagggcttcaaggaatatcatgagaaaaacggcacaggccttccgaaaatgcgcggctttgaagctgagggtgcggcggcaatcgtgcgcaatgaagtgattgaaaatccggaaacaatagcgacagccattcgtatcggaaacccggcaagctgggacaaagctgtaaaggcagccgaggaatccaatgggaaaattgacgaagtcactgatgatgaaatccttcacgcatatcagctgatcgcccgtgtagaaggcgtgtttgcagaaccaggttcttgcgcgtctatcgcaggagtgctgaaacaggtgaaatccggagaaattccgaaaggcagcaaggtcgtagctgtgttaacaggaaacggactgaaagatccgaacacagcggtcgacatttcagaaatcaagcctgtcacattgccgactgatgaagacagcatccttgaatatgtaaaaggagcggcccgtgtatgaacgaagccgacatgctgttctctgtcactgttcccggaagcacagctaacctaggccccggctttgattcagtcggaatggcgctcagcagatatttgaagctgaccgtctttgaaagcgacaaatggtcttttgaggctgaaacagaaacagtcgccggaattcgcggtacagataacctgatctaccaagtggctaaacggaccgcagatttgtacggaaaagaaatgcctcctgtccatgtgaaggtgtggagcgacatcccgcttgcacgcggccttggcagcagcgccgcagcgattgtagcggccattgaactggctgatgaattatgcggcttaaagctgtctgaagcggacaagctgcatttagcgagtctagaagaaggacacccggacaatgctggcgcttctctcgtcggcggacttgtgatcggcctgcatgaggatgacgagacccaaatgatccgcgtcccgaatgctgacattgacgtagtcgttgtcattcctttttatgaagtgctgacaagagacgcgagagacgtgcttccgaaggagtttccatatgccgatgccgtaaaagcaagtgctgtcagcaatatcctcattgctgcgatcatgtccaaggattggccgcttgtcgggaaaatcatgaagaaggatatgttccatcagccgtaccgggcgatgcttgtgcctgagctgtcaaaagtagagcacgtcgccgagatgaagggcgcatatggaacggctctcagcggagcaggcccaacgattctcgtcatgaccgaaaaaggaaagggagaagagctaaaagaacagctcgcgcttcatttccctcattgtgaagtagacgctttgaccgttccgaaagagggaagtataatagagcgaaatcctttatatcaagtaaaaagtgtatag

SEQ ID NO: 3629 - DNA, 1982 bp, Bacillus subtilis; identical to SEQ ID NO: 3628

SEQ ID NO: 3630 - DNA, 1982 bp, Bacillus subtilis; identical to SEQ ID NO: 3628

SEQ ID NO: 3631 - DNA, 2460 bp, Cricetulus griseus; identical to SEQ ID NO: 941

SEQ ID NO: 3632 - DNA, 2292 bp, Mus musculus
atgatggatcaagccagatcagcattctctaacttgtttggtggggaaccattgtcatacacccggtttagccttgctcggcaagtagatggagataacagtcatgtggagatgaaactggctgcagatgaagaagaaaatgccgacaataacatgaaggctagtgtcagaaaacccaagaggtttaatggaagactctgctttgcagctattgcactagtcattttcttcttgattggattcatgagtggctacctgggctattgtaagcgtgtagaacaaaaagaggagtgtgtgaaactggctgaaacggaggagacagacaagtcagaaaccatggaaacagaggatgttcctacatcatctcgcttatattgggcagacctcaaaacactgttgtcagagaagttgaactccatagagtttgctgacaccatcaagcagctgagccagaatacatacactcctcgtgaggctggatctcaaaaagatgaaagtcttgcctattatattgaaaatcagttccatgaatttaaattcagcaaagtctggcgagatgaacactatgtgaagattcaagtgaaaagcagcattggtcaaaacatggtgaccatagtgcagtcaaatggtaacttagacccagtggagtctcccgagggttatgtggcattcagtaaacctacagaagtttctggtaaactggtccatgctaattttggcactaaaaaggactttgaagaactaagttattctgtgaatggatctttagtgattgttagagcaggggaaattacttttgcagaaaaggttgcaaatgcccaaagctttaatgcaattggtgtcctcatatacatggacaagaataaattccccgttgttgaggcagaccttgcactctttggacatgctcatctaggaactggtgatccatacacacctggctttccttctttcaatcatactcagtttccgccatctcagtcatcagggttgcctaatatacctgtgcaaacaatctcaagagctgctgcagaaaagctatttggaaaaatggaaggaagctgtcctgctagatggaacatagattcttcatgtaagctggaactttcacagaatcaaaatgtgaagctcattgtgaaaaacgtactgaaagaaagaagaatacttaacatctttggagttattaaaggttatgaggaaccagaccgttatgttgtagtaggagcccagagagacgctttgggtgctggtgttgcggcgaagtccagtgtgggaacaggtcttctgttgaaacttgcccaagtattctcagatatgatttcaaaagatggatttagacccagcagaagtataatctttgccagctggactgcaggcgactttggagctgttggtgccactgagtggttggagggatacctttcatctttgcatttaaaagctttcacttatattaatttggataaagttgtccttggtactagtaacttcaaagtttctgccagccccttattatatacacttatgggaaagataatgcaagatgtaaagcatccagttgatggaaaatctctatatagagacagcaattggattagcaaagttgagaaactttcctttgacaatgctgcatatcctttccttgcatattctggaatcccagcagtttctttttgtttttgtgaggatgcagactatccttatttgggcactagattggatacctatgaggcattgactcagaaagttcctcagctcaaccaaatggttcgtacagcagcggaagtggctggtcagctcattattaaacttacccatgacgttgaattgaacctggactatgagatgtataacagcaaactactgtcatttatgaaggatctgaaccagttcaaaacagatatcagggatatgggtctaagtctacagtggctgtattccgctcgtggagactacttccgtgctacttctagactaacaactgattttcataatgctgagaaaacaaacagatttgtcatgagggaaatcaatgatcgtattatgaaagtggagtatcacttcctgtcgccctatgtatctccaagagagtctcctttccgacatatcttctggggctctggctctcacactctctcagctttagtggagaacttgaagcttcgtcaaaaaaatattactgcttttaatgaaaccctcttcagaaaccagttggccctggctacttggactattcagggagtcgcaaatgccctctctggtgacatttggaatattgacaatgagttttaa

SEQ ID NO: 3633 - DNA, 3413 bp, Rattus norvegicus
catagagttcactgacatcatcaagcagctgagccagaatacatatactcctcgtgaggctggatctcagaaagacgagaatcttgcctattatattgaaaatctgttccatgactttaaattcagcaaagtctggcgagatgaacattatgtgaagattcaagtgaaaaacagtgtttctcaaaacttggtgaccataaattcaggtagtaacattgacccagtggaggctcctgagggttatgtggcatttagtaaagctggagaagttactggtaaactggtccatgctaattttggcactaaaaaggactttgaagaattaaattattctgtgaatggatctttagtgattgttagagcagggaaaattacttttgcagaaaaggttgcaaatgcccaaagctttaatgcaattggtgtcctcatctacatggacaggaatacgttccccgttgttgaggcagaccttcaattctttggacatgctcatctaggaactggggatccatatacacctggctttccttctttcaaccatactcagtttccgccatctcagtcatctggattgccttctatacctgtgcagacgatctcaagagctcctgcagaaaagctattcaaaaacatggaaggaaactgtcctcctagttggaatatagattcctcatgtaagctggaactttcacagaatcaaaatgtgaagctcactgtgaacaatgtactgaaagaaacaagaatacttaacatctttggcgttattaaaggctatgaggaaccagaccgctacattgtagtaggagcccagagagacgcttggggccctggtgttgcgaagtccagtgtgggaacaggtcttctgttgaaacttgcccaagtattctcagatatgatttcaaaagatggatttagacccagcaggagtattatctttgccagctggactgcaggagactatggagctgttggtccgactgagtggctggaggggtacctttcatctttgcatctaaaggctttcacttacattaatctggataaagtcgtcctgggtactagcaacttcaaggtttctgccagccccctattatatacacttatggggaagataatgcaggacgtaaagcatccgattgatggaaaatatctatatcgaaacagtaattggattagcaaaattgaggaactttccttggacaatgctgcattcccttttcttgcatattcaggaatcccagcagtttctttctgtttttgtgaggatgaggactatccttatttgggcactaaactagatacctatgagatattaattcagaaagttcctcagctcaaccaaatggttcgtacagcagcagaggtggccggtcagttcattattaaacttacccatgacattgagttgaccctggactatgagatgtacaacagcaaactactgtcatttatgaaggatctgaaccagttcaaagcagatataaaagatatgggtctaagtctacaatggctgtattctgctcgtggagactacttccgtgctacttctagactaacaactgattttcataatgctgagaaaacaaacagattcgtcatgagggaaatcaatgatcgtattatgaaagtggagtatcacttcctgtcaccctatgtatctccaagagagtctcctttccgacacatcttctggggctctggctctcacaccctctcagctttagtggagaacctgagacttcgtcagaaaaatatcactgctttcaatgaaacgctcttcagaaaccagttggccctggctacgtggactattcagggagttgcaaatgccctctctggtgacatttggaatattgacaatgagttttaaatgtaatgtgcataattaagtgagagagggtagtctgtttctagacttgagctggttgtgctaaattttcattagagctcgaattaatgttaaaaattctacccaatcatctaatgtgtttaggcagcagcttttagtgcagggttggacccacacttcaagttacagtggacaacactttccatgttcatgataccttcttagattatctttagaattttgagtcttttgtaataccttgctctttgcttcatggtcatgaaaatgtcagaaccagttgtaagaacattgctataagtcctgagggcactactagtatcttgaggtgggaggaagagggtgtatgtgaggggcagagtggtcgctgggtgtgattccccatctccatctgaccctcactgggattctccaattgagctgtatgcctgaaggatttagctggcttccattcccctaaagtagacagttacttttcagaagaggtgcaacttgttttcttgccagcaaggttgaactaggtccttctgctggataaaagaaaggaagtttgtctgtttacaggaataaggccttattggtttaacctttgtgttatttaggatgagaccagaagccaaagacttcaagttttctctccactgtcatctacccagtagtctttagttctttgggttgttttgtttttgttttgtttttcttttccaacactttctgaaaaagaacaggtttagactcagtctgtcagcagaacacactgccgagctcggtacccggggatcctctagagtcgacctgcaggcatgcaagctttccctatagtgagtcgtattagagcttggtgcatgcctgcaggtcgactctagaggatccccgggtaccgagctctggccaaagtgctggtcttcagggaagctctgtcgtttttggcactgagatatttattgtttatttatcagtgacagagttcactataaatagtgtttttttaatagaagataattatcggaagcagtgccttccataattatgacagttatactgtcgttttcttttaataaaagcagcatctgctaatgagacccacagatactggaagttttgcacttacggtcagcacttgcgggctttagaaaggagaaagccacaagccaaacaatatccgatgagctagaagaggattgggttaaataagagattcctagttgagttggaaaaaaatgataattctaagtccagtgagttgtggccaagttaaatgtcatttaaaggctatgatagtacatcaacaaaattctatagctcagtttattcaagatgtaactcaaatccaattttgcaaaatttccagtacctttgtcacaaacttaactcacattatcgggagcagtgtcttccataatgtataaagaacaaggtagtttttgcctaccacagtgtctatatcggagacagtgacctccatatgttacactaagggtgtacgtaattatcgggaacagtgtttcccataattttcttcatgcgatgacatcttcaaagcttg

SEQ ID NO: 3634 - DNA, 2460 bp, Cricetulus griseus; identical to SEQ ID NO: 941

SEQ ID NO: 3635 - DNA, 2292 bp, Mus musculus; identical to SEQ ID NO: 3632

SEQ ID NO: 3636 - DNA, 3413 bp, Rattus norvegicus; identical to SEQ ID NO: 3633

SEQ ID NO: 3637 - DNA, 2460 bp, Cricetulus griseus; identical to SEQ ID NO: 941

SEQ ID NO: 3638 - DNA, 2292 bp, Mus musculus; identical to SEQ ID NO: 3632

SEQ ID NO: 3639 - DNA, 3413 bp, Rattus norvegicus; identical to SEQ ID NO: 3633

SEQ ID NO: 3640 - DNA, 2525 bp, Bacillus subtilis
ctcgagccaacaccgagagagacatacggcgggtgtattgcctacattgggtttgacgggaatatcgactcttgtattacgattcgcacgatgagtgtaaagaacggtgttgcatcgatacaggcaggtgctggcattgttgctgattctgttccggaagccgaatacgaagaaagctgtaataaagccggtgcgctgctgaaaacgattcatattgcagaagacatgtttcatagcaaggaggataaagctgatgaacagatttctacaattgtgcgttgacggaaaaacccttactgccggtgaggctgaaacgctgatgaatatgatgatggcagcggaaatgactccttctgaaatgggggggatattgtcaattcttgctcatcggggggagacgccagaagagcttgcgggttttgtgaaggcaatgcgggcacacgctcttacagtcgatggacttcctgatattgttgatacatgcggaacagggggagacggtatttccacttttaatatctcaacggcctcggcaattgttgcctcggcagctggtgcgaaaatcgctaagcatggcaatcgctctgtctcttctaaaagcggaagcgctgatgttttagaggagctagaggtttctattcaaaccactcccgaaaaggtcaaaagcagcattgaaacaaacaacatgggatttctttttgcgccgctttaccattcgtctatgaaacatgtagcaggtactagaaaagagctaggtttcagaacggtatttaatctgcttgggccgctcagcaatcctttacaggcgaagcgtcaggtgattggggtctattctgttgaaaaagctggactgatggcaagcgcactggagacgtttcagccgaagcacgtcatgtttgtatcaagccgtgacggtttagatgagctttcaattacagcaccgaccgacgtgattgaattaaaggacggagagcgccgggaatataccgtttcacccgaagatttcggtttcacaaatggcagacttgaagatttacaggtgcagtcaccgaaagagagcgcctatctcattcagaatatttttgaaaataaaagcagcagttccgctttatctattacggcttttaatgcgggagctgcgatttacacggcgggaattaccgcctcactgaaggaaggaacggagctggcgttagagacgattacaagcggaggcgctgccgcgcagcttgaacgactaaagcagaaagaggaagagatctatgcttgaaaaaatcatcaaacaaaagaaagaagaagtgaaaacactggttttgccggtagagcagcctttcgagaaacgttcatttaaggaggcgctggcaagcccgaatcggtttatcgggttgattgccgaagtgaagaaagcatcgccgtcaaaagggcttattaaagaggattttgtgcctgtgcagattgcaatagactatgaggctgcgaaggcagatgcgatttccgttttaacagacaccccgttttttcaaggggaaaacagttatttatcagacgtaaagcgtgctgtttcgattcctgtacttagaaaagattttattcttgattctcttcaagtagaggaatcaagaagaatcggagcggatgccatattgttaatcggcgaggtgcttgatcccttacaccttcatgaattatatcttgaagcaggtgaaaaggggatggacgtgttagtggaggttcatgatgcatcaacgctagaacaaatattgaaagtgttcacacccgacattctcggcgtaaataatcgaaacctaaaaacgtttgaaacatctgtaaagcagacagaacaaatcgcatctctcgttccgaaagaatccttgcttgtcagcgaaagcggaatcggttctttagaacatttaacatttgtcaatgaacatggggcgcgagctgtacttatcggtgaatcattgatgagacaaacttctcagcgtaaagcaatccatgctttgtttagggagtgaggttgtgaagaaaccggcattaaaatattgcggtattcggtcactaaaggatttgcagcttgcggcggaatcacaggctgattacctaggatttatttttgctaaaagcaaacgaaaagtatctccggaagatgtgaaaaaatggctgaaccaagttcgtgtcgaaaaacaggttgcaggtgtttttgttaatgaatcaatagagacgatgtcacgtattgccaagagcttgaagctcgacgtcattcagcttcacggtgatgaaaaaccggcggatgctgctgctcttcgcaagctgacaggctgtgaaatatggaaggcgcttcaccatcaagataacacaactcaagaaatagcccgctttaaagataatgttgacggctttgtgattgattcatctgtaaaagggtctagaggcggaactggtgttgcattttcttgggaatgtgtgccggaatatcagcaggcggctattggtaaacgctgttttatcgcaggcggcgtggatcc

SEQ ID NO: 3641 - DNA, 2525 bp, Bacillus subtilis; identical to SEQ ID NO: 3640

SEQ ID NO: 3642 - DNA, 2525 bp, Bacillus subtilis; identical to SEQ ID NO: 3640

SEQ ID NO: 3643 - DNA, 856 bp, Unknown; identical to SEQ ID NO: 1
  neomycin phosphotransferase II

SEQ ID NO: 3644 - DNA, 554 bp, Unknown; identical to SEQ ID NO: 2
  internal ribosomal entry site (IRES)

SEQ ID NO: 3645 - DNA, 1216 bp, Homo sapiens; identical to SEQ ID NO: 3

SEQ ID NO: 3646 - DNA, 564 bp, Cricetulus griseus; identical to SEQ ID NO: 4

SEQ ID NO: 3647 - DNA, 1287 bp, Homo sapiens; identical to SEQ ID NO: 5

SEQ ID NO: 3648 - DNA, 1029 bp, Homo sapiens; identical to SEQ ID NO: 6

SEQ ID NO: 3649 - DNA, 746 bp, Homo sapiens; identical to SEQ ID NO: 7

SEQ ID NO: 3650 - DNA, 1400 bp, Homo sapiens
ttgggctgagctggctttttcttgtggctattttaaaaggtgtccagtgtgaggtgcagctgctggagtccggcggcggcctggtgcagcccggcggctccctgcgcctgtcctgcgccgcctccggcttcaccttctccaactacggcatgtcctgggtgcgccaggcccccggcaagggcctggagtgggtggcctccatccgctccggcggcggccgcacctactactccgacaacgtgaagggccgcttcaccatctcccgcgacaactccaagaacaccctgtacctgcagatgaactccctgcgcgccgaggacaccgccgtgtactactgcgtgcgctacgaccactactccggctcctccgactactggggccagggcaccctggtgaccgtgtcctccgcctccaccaagggcccatcggtcttccccctggcaccctcctccaagagcacctctgggggcacagcggccctgggctgcctggtcaaggactacttccccgaaccggtgacggtgtcgtggaactcaggcgccctgaccagcggcgtccacaccttcccggctgtcctacagtcctcaggactctactccctcagcagcgtagtgaccgtgccctccagcagcttgggcacccagacctacatctgcaacgtgaatcacaagcccagcaacaccaaggtggacaagaaagttgagcccaaatcttgtgacaaaactcacacatgcccaccgtgcccagcacctgaactcctggggggaccgtcagtcttcctcttccccccaaaacccaaggacaccctcatgatctcccggacccctgaggtcacatgcgtggtggtggacgtgagccacgaagaccctgaggtcaagttcaactggtacgtggacggcgtggaggtgcataatgccaagacaaagccgcgggaggagcagtacaacagcacgtaccgtgtggtcagcgtcctcaccgtcctgcaccaggactggctgaatggcaaggagtacaagtgcaaggtctccaacaaagccctcccagcccccatcgagaaaaccatctccaaagccaaagggcagccccgagaaccacaggtgtacaccctgcccccatcccgggaggagatgaccaagaaccaggtcagcctgacctgcctggtcaaaggcttctatcccagcgacatcgccgtggagtgggagagcaatgggcagccggagaacaactacaagaccacgcctcccgtgctggactccgacggctccttcttcctctatagcaagctcaccgtggacaagagcaggtggcagcaggggaacgtcttctcatgctccgtgatgcatgaggctctgcacaaccactacacgcagaagagcctctccctgtccccgggtaaatga

SEQ ID NO: 3651 - DNA, 564 bp, Mus musculus; identical to SEQ ID NO: 9

SEQ ID NO: 3652 - DNA, 1400 bp, Homo sapiens
ccgaggggggctgggctccatctttgtctgggcctcggggaacgggggccgggaacatgacagctgcaactgcgacggctacaccaacagtatctacacgctgtccatcagcagcgccacgcagtttggcaacgtgccgtggtacagcgaggcctgctcgtccacactggccacgacctacagcagtggcaaccagaatgagaagcagatcgtgacgactgacttgcggcagaagtgcacggagtctcacacgggcacctcagcctctgcccccttagcagccggcatcattgctctcaccctggaggccaataagaacctcacatggcgggacatgcaacacctggtggtacagacctcgaagccagcccacctcaatgccaacgactgggccaccaatggtgtgggccggaaagtgagccactcatatggctacgggcttttggacgcaggcgccatggtggccctggcccagaattggaccacagtggccccccagcggaagtgcatcatcgacatcctcaccgagcccaaagacatcgggaaacggctcgaggtgcggaagaccgtgaccgcgtgcctgggcgagcccaaccacatcactcggctggagcacgctcaggcgcggctcaccctgtcctataatcgccgtggcgacctggccatccacctggtcagccccatgggcacccgctccaccctgctggcagccaggccacatgactactccgcagatgggtttaatgactgggccttcatgacaactcattcctgggatgaggatccctctggcgagtgggtcctagagattgaaaacaccagcgaagccaacaactatgggacgctgaccaagttcaccctcgtactctatggcaccgcccctgaggggctgcccgtacctccagaaagcagtggctgcaagaccctcacgtccagtcaggcctgtgtggtgtgcgaggaaggcttctccctgcaccagaagagctgtgtccagcactgccctccaggcttcgccccccaagtcctcgatacgcactatagcaccgagaatgacgtggagaccatccgggccagcgtctgcgccccctgccacgcctcatgtgccacatgccaggggccggccctgacagactgcctcagctgccccagccacgcctccttggaccctgtggagcagacttgctcccggcaaagccagagcagccgagagtccccgccacagcagcagccacctcggctgcccccggaggtggaggcggggcaacggctgcgggcagggctgctgccctcacacctgcctgagtgatgagcccactgcccaccccctcaagccaatcccctccttgggcactttttaattcaccaaagtatttttttatctgtcgactctagacccgggg

SEQ ID NO: 3653 - DNA, 942 bp, Homo sapiens; identical to SEQ ID NO: 11

SEQ ID NO: 3654 - DNA, 1400 bp, Homo sapiens
cgaacatcttcctcaaatttggatctggctatgtaagtggctggggaagagtcttccacaaagggagatcagctttagttcttcagtaccttagagttccacttgttgaccgagccacatgtcttcgatctacaaagttcaccatctataacaacatgttctgtgctggcttccatgaaggaggtagagattcatgtcaaggagatagtgggggaccccatgttactgaagtggaagggaccagtttcttaactggaattattagctggggtgaagagtgtgcaatgaaaggcaaatatggaatatataccaaggtatcccggtatgtcaactggattaaggaaaaaacaaagctcacttaatgaaagatggatttccaaggttaattcattggaattgaaaattaacagggcctctcactaactaatcactttcccatcttttgttagatttgaatatatacattctatgatcattgctttttctctttacaggggagaatttcatattttacctgagcaaattgattagaaaatggaaccactagaggaatataatgtgttaggaaattacagtcatttctaagggcccagcccttgacaaaattgtgaagttaaattctccactctgtccatcagatactatggttctccactatggcaactaactcactcaattttccctccttagcagcattccatcttcccgatcttctttgcttctccaaccaaaacatcaatgtttattagttctgtatacagtacaggatctttggtctactctatcacaaggccagtaccacactcatgaagaaagaacacaggagtagctgagaggctaaaactcatcaaaaacactactccttttcctctaccctattcctcaatcttttaccttttccaaatcccaatccccaaatcagtttttctctttcttactccctctctcccttttaccctccatggtcgttaaaggagagatggggagcatcattctgttatacttctgtacacagttatacatgtctatcaaacccagacttgcttccatagtggagacttgcttttcagaacatagggatgaagtaaggtgcctgaaaagtttgggggaaaagtttctttcagagagttaagttattttatatatataatatatatataaaatatataatatacaatataaatatatagtgtgtgtgtgtatgcgtgtgtgtagacacacacgcatacacacatataatggaagcaataagccattctaagagcttgtatggttatggaggtctgactaggcatgatttcacgaaggcaagattggcatatcattgtaactaaaaaagctgacattgacccagacatattgtactctttctaaaaataataataatctagaggcctctg

SEQ ID NO: 3655 - DNA, 1400 bp, Homo sapiens
atgggagacaagtgacagtacaggaatttgctctgtttctcaccatctttgatgagaccaaaagctggtacttcactgaaaatatggaaagaaactgcagggctccctgcaatatccagatggaagatcccacttttaaagagaattatcgcttccatgcaatcaatggctacataatggatacactacctggcttagtaatggctcaggatcaaaggattcgatggtatctgctcagcatgggcagcaatgaaaacatccattctattcatttcagtggacatgtgttcactgtacgaaaaaaagaggagtataaaatggcactgtacaatctctatccaggtgtttttgagacagtggaaatgttaccatccaaagctggaatttggcgggtggaatgccttattggcgagcatctacatgctgggatgagcacactttttctggtgtacagcaataagtgtcagactcccctgggaatggcttctggacacattagagattttcagattacagcttcaggacaatatggacagtgggccccaaagctggccagacttcattattccggatcaatcaatgcctggagcaccaaggagcccttttcttggatcaaggtggatctgttggcaccaatgattattcacggcatcaagacccagggtgcccgtcagaagttctccagcctctacatctctcagtttatcatcatgtatagtcttgatgggaagaagtggcagacttatcgaggaaattccactggaaccttaatggtcttctttggcaatgtggattcatctgggataaaacacaatatttttaaccctccaattattgctcgatacatccgtttgcacccaactcattatagcattcgcagcactcttcgcatggagttgatgggctgtgatttaaatagttgcagcatgccattgggaatggagagtaaagcaatatcagatgcacagattactgcttcatcctactttaccaatatgtttgccacctggtctccttcaaaagctcgacttcacctccaagggaggagtaatgcctggagacctcaggtgaataatccaaaagagtggctgcaagtggacttccagaagacaatgaaagtcacaggagtaactactcagggagtaaaatctctgcttaccagcatgtatgtgaaggagttcctcatctccagcagtcaagatggccatcagtggactctcttttttcagaatggcaaagtaaaggtttttcagggaaatcaagactccttcacacctgtggtgaactctctagacccaccgttactgactcgctaccttcgaattcacccccagagttgggtgcaccagattgccctgaggatggaggttctgggctgcgaggcacaggacctctactga

SEQ ID NO: 3656 - DNA, 1400 bp, Homo sapiens
acacgcttttaccatggcaatgcacaaatggatcagaagttcaaagttcctgggcagaaactacttattggatatcaccacaaggaattccagaaactaaagttcaggatatggattgcgtatattacaattggcaatatttactctgttcttggaaacctggcataggtgtacttcttgataccaattacaacttgttttactggtatgagggcttggatcatgcattacagtgtgttgattacatcaaggctgatggacaaaatataggatgcagatttccctatttggaggcatcagactataaagatttctatatttgtgttaatggatcatcagagaacaagcctatcagatccagttatttcacttttcagcttcaaaatatagttaaacctttgccgccagtctatcttacttttactcgggagagttcatgtgaaattaagctgaaatggagcatacctttgggacctattccagcaaggtgttttgattatgaaattgagatcagagaagatgatactaccttggtgactgctacagttgaaaatgaaacatacaccttgaaaacaacaaatgaaacccgacaattatgctttgtagtaagaagcaaagtgaatatttattgctcagatgacggaatttggagtgagtggagtgataaacaatgctgggaaggtgaagacctatcgaagaaaactcccaaatcttgtgacaaaactcacacatgcccaccgtgcccagcacctgaactcctggggggaccgtcagtcttcctcttccccccaaaacccaaggacaccctcatgatctcccggacccctgaggtcacatgcgtggtggtggacgtgagccacgaagaccctgaggtcaagttcaactggtacgtggacggcgtggaggtgcataatgccaagacaaagccgcgggaggagcagtacaacagcacgtaccgtgtggtcagcgtcctcaccgtcctgcaccaggactggctgaatggcaaggagtacaagtgcaaggtctccaacaaagccctcccagtccccatcgagaaaaccatctccaaagccaaagggcagccccgagaaccacaggtgtacaccctgcccccatcccgggaggagatgaccaagaaccaggtcagcctgacctgcctggtcaaaggcttctatcccagcgacatcgccgtggagtgggagagcaatgggcagccggagaacaactacaagaccacgcctcccgtgctggactccgacggctccttcttcctctatagcaagctcaccgtggacaagagcaggtggcagcaggggaacgtcttctcatgctccgtgatgcatgaggctctgcacaaccactacacgcagaagagcctctccctgtccccgggtaaatga

SEQ ID NO: 3657 - DNA, 1400 bp, Homo sapiens
caaccctgatgccttacactcgcctcactcagctgaacctagataggtgcgagctcaccaagctccaggtcgatgggacgctgccagtgctggggaccctggatctatcccacaatcagctgcaaagcctgcccttgctagggcagacactgcctgctctcaccgtcctggacgtctccttcaaccggctgacctcgctgcctcttggtgccctgcgtggtcttggcgaactccaagagctctacctgaaaggcaatgagctgaagaccctgcccccagggctcctgacgcccacacccaagctggagaagctcagtctggctaacaacaacttgactgagctccccgctgggctcctgaatgggctggagaatctcgacacccttctcctccaagagaactcgctgtatacaataccaaagggcttttttgggtcccacctcctgccttttgcttttctccacgggaacccctggttatgcaactgtgagatcctctattttcgtcgctggctgcaggacaatgctgaaaatgtctacgtatggaagcaagtggtggacgtcaaggccgtgacctctaacgtggccagtgtgcagtgtgacaattcagacaagtttcccgtctacaaatacccaggaaaggggtgccccacccttggtgatgaaggtgacacagacctatatgattactacccagaagaggacactgagggcgataaggtgcggccgcacacatgcccaccgtgcccagcacctgaagccctgggggcaccgtcagtcttcctcttccccccaaaacccaaggacaccctcatgatctcccggacccctgaggtcacatgcgtggtggtggacgtgagccacgaagaccctgaggtcaagttcaactggtacgtggacggcgtggaggtgcataatgccaagacaaagccgcgggaggagcagtacaacagcacgtaccgtgtggtcagcgtcctcaccgtcctgcaccaggactggctgaatggcaaggagtacaagtgcaaggtctccaacaaagccctcccagtccccatcgagaaaaccatctccaaagccaaagggcagccccgagaaccacaggtgtacaccctgcccccatcccgggaggagatgaccaagaaccaggtcagcctgacctgcctggtcaaaggcttctatcccagcgacatcgccgtggagtgggagagcaatgggcagccggagaacaactacaagaccacgcctcccgtgctggactccgacggccccttcttcctctacagcaagctcaccgtggacaagagcaggtggcagcaggggaacgtcttctcatgctccgtgatgcatgaggctctgcacaaccactacacgcagaagagcctctccctgtctccgggtaaa

SEQ ID NO: 3658 - DNA, 1400 bp, Homo sapiens
ccgcccaggtggcatttacaccctacgccccggagcccgggagcacatgccggctcagagaatactatgaccagacagctcagatgtgctgcagcaaatgctcgccgggccaacatgcaaaagtcttctgtaccaagacctcggacaccgtgtgtgactcctgtgaggacagcacatacacccagctctggaactgggttcccgagtgcttgagctgtggctcccgctgtagctctgaccaggtggaaactcaagcctgcactcgggaacagaaccgcatctgcacctgcaggcccggctggtactgcgcgctgagcaagcaggaggggtgccggctgtgcgcgccgctgcgcaagtgccgcccgggcttcggcgtggccagaccaggaactgaaacatcagacgtggtgtgcaagccctgtgccccggggacgttctccaacacgacttcatccacggatatttgcaggccccaccagatctgtaacgtggtggccatccctgggaatgcaagcatggatgcagtctgcacgtccacgtcccccacccggagtatggccccaggggcagtacacttaccccagccagtgtccacacgatcccaacacacgcagccaactccagaacccagcactgctccaagcacctccttcctgctcccaatgggccccagccccccagctgaagggagcactggcgacgagcccaaatcttgtgacaaaactcacacatgcccaccgtgcccagcacctgaactcctggggggaccgtcagtcttcctcttccccccaaaacccaaggacaccctcatgatctcccggacccctgaggtcacatgcgtggtggtggacgtgagccacgaagaccctgaggtcaagttcaactggtacgtggacggcgtggaggtgcataatgccaagacaaagccgcgggaggagcagtacaacagcacgtaccgtgtggtcagcgtcctcaccgtcctgcaccaggactggctgaatggcaaggagtacaagtgcaaggtctccaacaaagccctcccagcccccatcgagaaaaccatctccaaagccaaagggcagccccgagaaccacaggtgtacaccctgcccccatcccgggaggagatgaccaagaaccaggtcagcctgacctgcctggtcaaaggcttctatcccagcgacatcgccgtggagtgggagagcaatgggcagccggagaacaactacaagaccacgcctcccgtgctggactccgacggctccttcttcctctatagcaagctcaccgtggacaagagcaggtggcagcaggggaacgtcttctcatgctccgtgatgcatgaggctctgcacaaccactacacgcagaagagcctctccctgtctccgggtaaatga

SEQ ID NO: 3659 - DNA, 396 bp, Homo sapiens; identical to SEQ ID NO: 17

SEQ ID NO: 3660 - DNA, 1312 bp, Homo sapiens; identical to SEQ ID NO: 18

SEQ ID NO: 3661 - DNA, 579 bp, Cricetulus griseus; identical to SEQ ID NO: 19

SEQ ID NO: 3662 - DNA, 578 bp, Cricetulus griseus; identical to SEQ ID NO: 20

SEQ ID NO: 3663 - DNA, 520 bp, Cricetulus griseus; identical to SEQ ID NO: 21

SEQ ID NO: 3664 - DNA, 581 bp, Cricetulus griseus; identical to SEQ ID NO: 22

SEQ ID NO: 3665 - DNA, 600 bp, Cricetulus griseus
ctgtattgtctgtgtctttgtgtttttgtgccggctgaaatctggttctgtgctttgcagtcgctcgtgtctcgggaagagacaagakctctggtctcgggaggagacagaatgtgatcagtagacgtgcttgggagatcaccgactgccaccctggaagacgttccakgaagtctgtgggaacctcakggacgcttgggagattcccgtctgggagccggtgagggyacrgtagtyctcctggattggggaagttatccgtcctcycggccgtstgtatttctggaatggttttgtctgtctargtggagacagacatctgatagtttttgtctgtgtcttgggtgttgttttgtcttatctgtgactttgatgatgggactgactgtaaccaacccccctcagtctgacttttgaccattggatggacgttaargaccatagttagtcagttaaagttacagcaccctctttcgttgagtcatgtggcgccacactaggtaactttatcttccagtctttgtttctgtatggyttctgtacaagaattgtttarggcagaggttcggatgacagcttctgcagtctgtatgagcggga

SEQ ID NO: 3666 - DNA, 580 bp, Cricetulus griseus; identical to SEQ ID NO: 24

SEQ ID NO: 3667 - DNA, 552 bp, Cricetulus griseus; identical to SEQ ID NO: 25

SEQ ID NO: 3668 - DNA, 582 bp, Cricetulus griseus
  misc_feature (191)..(241): n is a, c, g, or t
  misc_feature (501)..(521): n is a, c, g, or t
gccttgaaagagttacttgtatttgktacatctaatgcttccctatctggttattacaggtcttcaaatacatgccaacgtaggcaagacattgtaatcgaactcctgagttgcccatcatgggcttcgacaatcacactcttgaykgawcctgtttttcctctgcatttcccaactcttgttttattttnnnnnnnnnnnnnnnnnnnnnnnnnnnnnnnnnnnnnnnnnnnnnnnnnnnatgcatttagtcccagcccctgtgaggcagagacaggcaaatctctgtgagtttgagatcagtctcatctacatagtgagttctagggcagccaaggctacaaattgagaccctgtctttaatcatcatcatcatcatcttattcataaatatttcagtattcactctaaaatgtaaagactcattttaaagtatgacaaggtccacatttccctgcctccatcatgatgttcagattttcaattgattcttttttttcnnnnnnnnnnnnnnnnnnnnnaaaacaaaacctttttggggggttttggaacctttgtgtccaaaaggcggggattaaaggc

SEQ ID NO: 3669 - DNA, 600 bp, Cricetulus griseus
tgttctcgagggcttaaatgtcctggtgacaatatctgagaaaaaaggataagttacgtgtctactatttatcctggttaagaaataaaattctacatmatgatccasaagttgagaagaagcaagggtggaccactgtgggcgatttggaargatgtgtacactataaagytgtaaaatatgaaagaataaaatttctggtaattgctttgaagagttctgtggaagtctatgcgtgggcaccgaakccatatcacaaatttatggcctttaagtcctttggagaactggtacataagccattactggtggatctcactgwtgaggaaggccakargttgaaagtgatctatkgatcctgtgctggatwccatgctgttgatgtggattcaggctcagtctatgacatttatctaccaacacacattcagtgtagcatcaaaccccatgcaatcattattctccccaacacggatggaatggagcttctggtgtgctatgaagatgagggggtttatgttaacacctctggaaggatcaccaaggatgtggttctgcactggggagagatgccgacatctgtagcatatatccgatcga

SEQ ID NO: 3670 - DNA, 580 bp, Cricetulus griseus; identical to SEQ ID NO: 28

SEQ ID NO: 3671 - DNA, 584 bp, Cricetulus griseus; identical to SEQ ID NO: 29
  misc_feature (416)..(467): n is a, c, g, or t

SEQ ID NO: 3672 - DNA, 600 bp, Cricetulus griseus
ttagacgtgtgcattgaatataactcatgcacttgcacatacagatagttttgaagtcttgcaatgaccgtgttaagagttcagcagtcttctgtatagggatttagatttataaaacttgctgtatttgttaccacttttgatctgtatgacagtcctgaaaatagatgatagccatctgctcatactctcctgtggttgtaaaaaggctgtttaatttgttgtctcctctcagagaactgaggtttttatagcttagccttttagggggacaatcctaaaagactgtactaaagaattcataaaagtgtgtgtattggggaagataacagtgaaaagaataagatagtggtttacatgaaactagaaagtcttttggggttttagagtaatcctgcaacactagcaacttcactgwggktatgaacacttaaaactagcggcaggcatacaactgcaagaagccattcrattgtcaagatttttatactactactgctgkatatttatactatataccasctatatagtgccccaaatattttctgccattcggacgttagaatcacaatttctaatgcctttattttggatcatgaa

SEQ ID NO: 3673 - DNA, 578 bp, Cricetulus griseus; identical to SEQ ID NO: 31

SEQ ID NO: 3674 - DNA, 579 bp, Cricetulus griseus; identical to SEQ ID NO: 32
  misc_feature (176)..(220): n is a, c, g, or t

SEQ ID NO: 3675 - DNA, 539 bp, Cricetulus griseus; identical to SEQ ID NO: 33
  misc_feature (303)..(319): n is a, c, g, or t

SEQ ID NO: 3676 - DNA, 600 bp, Cricetulus griseus
gaaaccagcagtactccakggacggccacaagatcccaggaggaaaagcccagcaaagtaaaagcacaacctgaaagaacagacgagtgtgaagaaacaattccacaactggtaccaatagaagaaataccaaataaagaaaacatgaagatgcaagaaaatggcacagggaaaaaacctccaaaaaagagacctgatccagatacccttaagggcaagawaaggaakgccctgccagctacagagatcccaggagctttggggcctgtcacctcggggaagaaacaaaaaaaagatgttcgggaaatcagaaagccaggagccaagttctttactcccaggaaagcttccaacacacccaaagacaaaaaaccccaagtggcccactcaaactaaaatcaggttcctctgcctgaaggaactatcaagaatacataggcagggtgtggttgcacacactgtgggacatagataggcagatttgtatgggtttgagtccagcctggttgcctacctggtagtttaggccagccagactagtgagacagacaaacttggccaagattggttgtgcacacctacattcctaacactcaagaa

SEQ ID NO: 3677 - DNA, 599 bp, Cricetulus griseus; identical to SEQ ID NO: 35

SEQ ID NO: 3678 - DNA, 600 bp, Cricetulus griseus
taattaaggggagagatgtcattgcacagtctcagtctggcacaggcaagacggccaccttcagcatttcagtcctccagtgcttggatatccaggttcgagaaacccaagctttgatcttggctccaacaagagagttagctgtacagattcagaagggtctgcttgctctgggggactacatgaatgtccagtgccatgcctgcatcgggggcaccaatgttggagaggacattcggaagctggactatgggcagcatgttgtggcaggcacacyagggcgtgtctttgatatgattcgccgtagaagtttaaggacccgggctatcaagatgttggttttggatgaggctgatgaaatgttgaacaaaggtttcaaggagcagatctacgatgtgtacaggtacctgccacctgccacccaggtggttctcatcagtgccacattgcctcatgagatcctggagatgaccaacaaattcatgactgaccccatccgcatcttggtgaagcgtgatgagttgactctggaaggcatcaagcagttctttgtggcagtggagagagaggagtggaagtttgacactctgtgtgatctct

SEQ ID NO: 3679 - DNA, 580 bp, Cricetulus griseus; identical to SEQ ID NO: 37
  misc_feature (473)..(489): n is a, c, g, or t

SEQ ID NO: 3680 - DNA, 579 bp, Cricetulus griseus; identical to SEQ ID NO: 38
  misc_feature (216)..(248): n is a, c, g, or t

SEQ ID NO: 3681 - DNA, 600 bp, Cricetulus griseus
cccttcaaccagggctatggggagggggccaaggagggtgctgatgaggaagagtgggtcgtggctaaagataagcctgtgtrcgatgaactcttttatacgctatcacccatcaatggcaagatatcaggtgtcaatgccaagaaggaaatggtgacctccaagctgcccaacagtgtcctgggcaagatctggaagctggccgactgtgactgcgacggcatgctggatgaggaggagtttgccctggccaagcacctcatcaagatcaagttggatggctacgagctaccgaacagcctgcccccacaccttgtgcccccctctcacaggaagtccctgccaaaggctgactgawgagggcgcaccgctggggtgggaaaggakggggtccctgggcctgaagtatgctatgccactgacttgctgaatgtccttagccaaggytctgtcctctccatatctcagttccctcatacgtagggtagggaakggcagatactggactctagatgaggtcctcttacctctaaaatccctaagtttctatcaaaatatttctatctaaatattgagaagagcactatatatggagattaa

SEQ ID NO: 3682 - DNA, 581 bp, Cricetulus griseus; identical to SEQ ID NO: 40
  misc_feature (445)..(462): n is a, c, g, or t

SEQ ID NO: 3683 - DNA, 600 bp, Cricetulus griseus
ctgccactgcgaccatggtctccggcagcagcggcctcgtagccgcccgcctgctgtcgcgcaccttcctcctgcagcataatgggatacggcatgcatcttatgacgcttcccggaaacatatctacattgatraaaataccaaggttatttgccakggtttcactggcaagcagggcacctttcacagccagcaggccttggaatatggcacaaaactcgtgggaggaacctcgccagggaagggcggcaagacacacctgggcttgcctgtttttaatactgygaaggaagccaaagagaagacaggagcgacagcttctgtcatttatgtacctcctccttttgctgctgccgccatcactgaagcagttgacgcadagattcccttggttgtgtgcattactgaaggtatcccacagcargatatggttcgggtcaggcacacactttcacaccaargaaakacgaggctaattgggccaaactgccctggaatcatcaatcctggagaatgtaaaattggcatcatgcctggccatattcacaagaaaggaaaaataggtattgtgtccagatctggcacgttgacttatgaag

SEQ ID NO: 3684 - DNA, 362 bp, Cricetulus griseus; identical to SEQ ID NO: 42
  misc_feature (69)..(91): n is a, c, g, or t

SEQ ID NO: 3685 - DNA, 204 bp, Cricetulus griseus
  misc_feature (30)..(30): n is a, c, g, or t
tcgacccacgccgtccgctgctgacctggnaatatcaacaatgtcatcagaatccagcaaaaaacggaaacccaaagtgatccgaagtgatggaaccccaagcgaagggaaacgaaatcgatctgacactgagcaggaaggcaaatactacagtgaggaggctgaggttgacctgcgggaccctggcagagactatgaattgtg

SEQ ID NO: 3686 - DNA, 567 bp, Cricetulus griseus; identical to SEQ ID NO: 44

SEQ ID NO: 3687 - DNA, 551 bp, Cricetulus griseus
gtttgtcctatcccagtgtggtttctttcctttgttttatcttactttattttattattatctttagaagtctgtctgttttctaatgagatgggtgggaaggaccaggagaagtgggagtagtagaagggaaaccttaatcaggatatattgtatgaaaaaaatgcattttcaattcaataacaaaaaagtacagcgaaagaggagtttagaaaaatgcactctacagcctaaatgccttgctttgtaaacaagttgattttggaacataattgtgtccacttgctttaagtgttttatgttgtctgtttctcacctcagtagtagaaggaggtggttatgaaagacaagctataatctacaacataaaataccacctgcattttgagaagtggttacacacgactctcttaaaacgttcatgcctacacttaggtgtgtcttatcctttccctggacacttctcccatggtgcttaaatctatgtaaaatttattccttataaagtctaactctgcttgtgataggaagaggggggatgtttggcatga

SEQ ID NO: 3688 - DNA, 578 bp, Cricetulus griseus; identical to SEQ ID NO: 46
  misc_feature (308)..(340): n is a, c, g, or t

SEQ ID NO: 3689 - DNA, 518 bp, Cricetulus griseus
  misc_feature (191)..(191): n is a, c, g, or t
  misc_feature (439)..(456): n is a, c, g, or t
taaacaaatcaaatcaaattcaagctgggggttcagtttttaagactcaagtgtggagaatgagactaagccaagctctaggtttcttgtaggggtgctatccaggtagggcaagcctaatgattgtcatttggcttgagatagttttcagttgtgtgggtttgtttggtttttgttgttgttcattttanttttactaaataataatatctcagaactttccaagtttctttatggtggtttcttttatcaaatgacttgcaaactacacatgcataagccgaaggatagagattcgaagatgtgctctccgggaagtgtttagatacatctaggataaggggggcgggattatgagctgtgggaaagagtaggcttaaaggttagtgtgacccctttatgtgtgtcagtaaagaagtcagtctgccaccaatggagnnnnnnnnnnnnnnnnnnggtttttttttggtttttcgagacagggtctctctgtttggagcctatcctggcacttgctc

SEQ ID NO: 3690 - DNA, 600 bp, Cricetulus griseus
atagaaccagtctgccatggcaagggctaaaggctgcaacaaagaaacaaaaatatgaaaagattagtgaaaagaagatgtccactcctgttgaagttttgtgtaaggggtttcctgcagaatttgccatgtacttaaattactgtcgtgggctgcgctttgaggaagctccggattacatgtatctgaggcagctattccgcatccttttcaggaccctgaaccaccaatatgactacacattttgattggacaatgttaaagcagawagcggcacagcaggcagcctcttccagtgggcagggtcagcaggcccaaacccccacaggcaagcaaactgacaaaaccaagagtaacatgaaaggtttctaggcatgaattgaggaagagaagcagcagagcagatgattggagcagcatttgtttctcccaaaactagacattttagttcatatgtacactatccagtggttgtggacaaccatttacttggagtaaagaacttactttaagtataaactggccccggacagcattgctgatgctgatcctgcgctatagccgctgaaattgtgaatattaactgatgtagcgaaacat

SEQ ID NO: 3691 - DNA, 579 bp, Cricetulus griseus; identical to SEQ ID NO: 49

SEQ ID NO: 3692 - DNA, 566 bp, Cricetulus griseus; identical to SEQ ID NO: 50

SEQ ID NO: 3693 - DNA, 462 bp, Cricetulus griseus; identical to SEQ ID NO: 51
  misc_feature (154)..(170): n is a, c, g, or t
  misc_feature (355)..(372): n is a, c, g, or t

SEQ ID NO: 3694 - DNA, 580 bp, Cricetulus griseus; identical to SEQ ID NO: 52

SEQ ID NO: 3695 - DNA, 600 bp, Cricetulus griseus
agctgcccacaatgaatggctctgaaggtcgscccgagttctatgacttcgacctcatcatcattggtggaggctcaggaggactggcggcagctaaggaggcagcaaamtttgataagaaggtgctggtcttggattttgtcacaccaactcctctcggaactagatggggtctgggaggaacgtgtgtgaacgtggggtgcatacctaaaaagctgatgcaccargcggctttgttaggacaagccttgaaagactctcgaaactatggatggaaagttgaggacacagttaagcmctgactggkagawgatsacasagkctgtgcasaatcacmtcggctcsctgaattggggctaccgagtwgctcttcgggaaamgaaggtctactatsagaactgcctatgggaaattcatyggttctcacamgattamgtgcwaaaratarcmmmkgawmmgcaaaaaatttwttcagcaragcggkttctyatygccmcykgggaaaggscmcgctacctgggcatccctggagacaaagagtactgcatcagcagggatgatctttttctcctgccttactgccccggtaaaaccctagtg

SEQ ID NO: 3696 - DNA, 600 bp, Cricetulus griseus
cgagcgatgggcatctctcgggacaactggcacaagcgccgcaagaccgggggtaagagaaagccctaccacaagaagcggaagtatgagctgggacggcctgctgccaacacgaagattggtcctcgtcgtatacacacagtccgagttcgaggaggcaataagaagtaccgtgccctaaggttggacgtgggaaacttttcctggggctctgagtgctgtactcgaaaaacaaggatcattgacgttgtctacaatgcatccaataacgagttggtccgcaccaagaccctggtgaagaactgcattgtgctcatcgacagcacaccgtaccggcagtggtacgagtcccactatgcactgcccctgggccgcaagaagggggccaagctgacccccgaggaggaagaaatattaaacaaaaagcgatcaaagaaaattcaaaagaaatatgatgagaggaaaaagaatgccaaaatcagcagccttctggaggagcagttccagcagggcaagcttcttgcctgtattgcctcaagaccaggccagtgcggcagagcagatggctatgtgctagaargcaaggagctggagttctac

SEQ ID NO: 3697 - DNA, 629 bp, Cricetulus griseus; identical to SEQ ID NO: 55

SEQ ID NO: 3698 - DNA, 600 bp, Cricetulus griseus
ctttcctggatccctcctcactggacccgagtgtggtggcagctcgggctggggcccctggtttccagagggtctgggctgtttcggctgctgtaactagatttagttcagtggtgctctggaggagaccgggagaagggttgaagtgtgaggctgggtggatgggaaaattagttttggtcttcacatctctggtttcatttttgctgtcgtagcgcttgttgctgtctctatgttaaaatgccaaaaatgatctagttgtcgctttcctcctgctccagcactccacagcagcttctggctttgtgaggtgtttgtctcagccagtgccatgacctggcaggaacagatctgggttcccactgtctcccatcatgtgtccgactatagtccgtcgggacaagcttctgcaaaactaacctgctttgtccggtttcccccagacaccacctctcgcttccacttgccgcctgagccttcctggtctctctctggctagtgctgcacagwgtctgcttctgctgtcctggaggtctcctgaagttgtgtggkcaccmararggccaaggacgcamtagccctgagctgagctgggctcat

SEQ ID NO: 3699 - DNA, 600 bp, Cricetulus griseus
tgtcatcaaccccatggccttgcgacagcgtgaagaactacgggagaagctggcagctgccaaggaaaagcgtttgctgaatcaaaaattggggaaaataaagactctgggggaggatgacccctggctagatgacaccgcagcctggattgagaggagccggcagctgcagaaggagaaggacctggcagagaagcgggccaagctactagaggagatggaccaagaatttggtgtgagcactctagtggaggaggagtttgagcagcggcgacaggacctgtatagtgcacgggacttgcagggcctcactgtggaacatgccattgattcttttcgagaaggggagactgtggtccttaccctcaaggacaaaggagtgttgcaggagggggaggatgtgctggtgaatgtgaacatggtagacaaggagcgggcagacaagaatgtggagcttcggaagaagaagcccgactacctgccgtatgcagaagacgagagtgtggatgatttggcacagcaaaaaccccgctctatcctggccaaatatgatgaggagctggagggcgagckgccacattccttccgtttggagcaagg

SEQ ID NO: 3700 - DNA, 600 bp, Cricetulus griseus
cgatgtgtgtacatcctggactgctggtctgatgtattsatctggcttggccgcaagtccccaagactagtgcgtgctgctgcactcaaactaggtcargagctgtgtgggatgctgcaccggccacrccatgcagyggtcagccgcagyctggaaggcaccgaggctcaggtgttcraggctaagttcaaaaattgggacgatgtgttgacagtaractacaactcraaatgcasaggctgtgctgcagggccaggggctctctsggaaagtaaagcgtgacactgakaagaaagaccasatgaaggcwkacctcactgcactcttsctgmcacggywgccaccaatggcmctggctgakgcmsabyamctgawggwrgaatggaatgavgacctkgatggcwtrgaakgcttsgywttggasggmasgaarwkcactcgaactgccrkaggamrartktggccacttmtacmcacaggactgctwkgtstwcytctgcargtwctgggtgcctgtgkagtatgacgaggaagagaagacggaagtcaaggaagggaagggcctcggtcatggcacagaaggggaggaagccaaaactt

SEQ ID NO: 3701 - DNA, 532 bp, Cricetulus griseus
atatatattatgctgcttccttaaactacttgytgctttakgatcaattkatatctttkttttcttcccttwccttgtcacctcaggtgcaaatctgaactcamgtgtctgcttttccattttctctktgccccatctttcccccattatccattwgactttattttaaataattgcatcagtctttaaaaaaaatatcaraaccaasgmratwtcaaasaaagctcaaagtttctwyymctggtgactttggaaagcaaccasaattgtcatatagatatatatggtcccttaaaatgcttttgtgtatgyggtgtttaaaaacagttaacttcacagtatctaggtctgartgtcataagtmctcttmacaccctgtccttgcaacaagtttccaaaagagtgtatgcrccttatagtctcagkscacacccatggagagatagtgcagttggkgacactttctagtcccagagctyacatggracctgagggtattaatgtggatcagggtgaawtgscctttctgyac

SEQ ID NO: 3702 - DNA, 581 bp, Cricetulus griseus
catttgtgttatgtgtttcttaagcatctctttctgtcccacattgcccatgcacgtggcatgcatgggtcargggtcttttcttgttgccctaakcacatggcacgggaraggagttctgccatgtgtcacgggttakaatgtgtkatgktggagtcccccgatgctgcttttctgaactcgamccactgctgcagcccttacagctgakcctggcccatgtargtgagtctttccctatccccacttgccggkcccrtgggtccctgccatttgcctakctgcccggcattctttgtgctctacacacatggtatgcakgggggccgcargastytttcssacccctgkattggyytarggtctggagttaccagcagcacccctaccccargkctctctgccttgagccacatggagctagagcgtatgaacttatctggcctgatccggacatctaaatggccctaaaggtattaagaactataaaagggactttgacaaaaattttatgttaacctaaaaatatcaaaaagggcggccgccaccgccggggagcttcaacttttggtccctctatt

SEQ ID NO: 3703 - DNA, 600 bp, Cricetulus griseus
  misc_feature (90)..(110): n is a, c, g, or t
agaccaggactatgcagctcattttgctgatcctgacaccttaktcaactgggactttgtggaacaagtgcgcatctgtagccatgaagnnnnnnnnnnnnnnnnnnnnntctatccaccgactgcagccaagataacccgctgtggacacattttctgctgggcgtgcatcctgcactacctttcactcagtgagaaagcctggagtaaatgtcccatctgctacagttctgtgcataagaaagacctcaagagtgttgttgccacagaatcacgccagtacgttgtgggtgataccattacaatgcagctgatgaagagagagaaaggagtgttggtggccttgcctaaatccaagtggatgaatgtagaccatcccattcatctaggagatgaacagcacagccagtactccaagttgctgctggcctctaaagagcaagtgctgcaccgagtagttctagaagagaaagtagcactggagcagcagctcgcagaggagaagcacactcctgagtcctgctttattgaggccgctatccaggagggtaagattcgggaagaggctctgtctggagtacctggaggcaaaagggaagg

SEQ ID NO: 3704 - DNA, 600 bp, Cricetulus griseus
  misc_feature (52)..(66): n is a, c, g, or t
  misc_feature (86)..(104): n is a, c, g, or t
accttcaakacagtatttgctgagcacatcaktgacgagtgtaagaggcgtnnnnnnnnnnnnnnncacaaatctaagaagaaggnnnnnnnnnnnnnnnnnnngaaatggcaggatgacatgggcaagaaacagctggagaasgacttcaacagcatgaagaagtactgccaagtcatccgcataattgctcacactcagatgcggctgcttcctttgcgccagaagaaggcacatttgatggagatccakgtgaacgggggcaccgkggctgaraagctagactgggcccgagagaggttggagcagcaggttcctgtgaaccaggtgtttggacaggatgagatgattgatgtcatcggggtgacaaaaggcaaaggctacaaaggggtgactagtcgttggcatacaaagaaactgccccgcaagacccatcgagggctgcgcaaagttgcctgtattggagcctggcaccctgcccgtgtggctttctctgtggctcgagctgggcagaaaggctaccatcaccgaacggagattaacaaaaagatttacaagattggtcaaggctacctcatcaaggatggtaagctgattaag

SEQ ID NO: 3705 - DNA, 579 bp, Cricetulus griseus; identical to SEQ ID NO: 63

SEQ ID NO: 3706 - DNA, 600 bp, Cricetulus griseus
ctcatttggattccatcaggaaagacatggtcatcctagagaaaagtgaatttgcaaatctgagagcagagaatgagaaaatgaaaattgaattagatcaagttaaacagcagctgactcatgaaagcagtcgaatcagagcagataataagttggacatcaacctggraaggagcagagtaacagacatgttcacagatcaagaaawgcaacttatggaagcaaccaatgaatttaccaaaaaggatacccaaaccaaaagtattatttcagagaccagtaataaaattgacactgaaattgcttccttaaaaacactgatggagtcgaacaaacttgagacaattcgatatcttgcagcctcggtgttcacttgcttggcaatagcattggggttttatcggttttggaaggaatattgacactcctcttgctgctgatcactccataaactgtactttctacatattcttcaaagtactcatcgactaaatagaagtgtttggatattttatttttaggttatatgactttattatgttgaaaagctgtctcccaaagcctggtttgagataaaaggacattttgtccttatccttt

SEQ ID NO: 3707 - DNA, 600 bp, Cricetulus griseus
aaaacccttatgkggkggccacagytgcascctgggtcctytraacararactytggkgkgggctttcacaaratggkcagkgaattcctgataaggaracttggkgaacacagtytytttccaaaggtcgggggttaggtasctgtaggtyttgraratggcatmaaaggkggccttggcaaakttgcccasggkggcagkgcascccctggctgacgtgtagcaktcatmaataccavccatcatcaktakcttyttaggcmcaggabcararacratsccaktgcctytgggggcarggatradacscmccaacacadasccacagbggcctgtcaytttacatggaacakkgkggggcttgccaatyttgttcccccaktascctyttckyacagggacaatggaaagcttggccasgatgatggcccctcggatggcagkggctacctccttggagcacttaacaccaaraccaacwtgaccrkkgtagbccccaatagcracraaagccttgaacctggtccgctggccagcccaagtctgcttctgcactggcatgatctttaaaacctcatcctttagggatgcgcccagga

SEQ ID NO: 3708 - DNA, 600 bp, Cricetulus griseus
tccaaaacgtcctatggctggattgagattgttggatgtgcggatcgttcctgctacgacctgtcctgtcatgctcgagtcaccaaagtcccactagtagctgagaaacctctgaaagaacccaaaatagttaatgttgtacagtttgagcccaataagggagcagtgggcaaagcgtacaagaaggatgcaaagctggtgatggagtacctcagctcctgtgacgaatgctacatcacagagatggaacagctgctgaacgagaaaggggaattcactattgaaaccgaagggaagacatttcagttaacgaaagacatggtcagtgtgaagagattccagaaaacactacacgtggaagaagttgttccgagtgtaattgagccctcctttggcctgggcaggatcatgtataccatattggagcacacattccatgtccgagagggagatgagcagagaacgttcttcagtttcccagctgtggttgctccattcaaatgttctgtccttccactgagccaaaaccaagagttcatgccatttgtcaaggaattatctgaagctctgaccaggaatggcgtgtctcataaagtagat

SEQ ID NO: 3709 - DNA, 600 bp, Cricetulus griseus
tgaatgcagatgatccagacctgcaaaggcctgatgaagaggctattaaagagataacagagaagacaagagtagccttggagaagtctgtgtcgcaraargttgctgcagccmtgcctgttcgtgcagctgacaagctggstcctgctcagtatatycgctacacaccatytcagcaaggagtagcattcmactctggagctaaacagagggttattcggatggtagaaatgcagaaagatccaatggagccgccaagattcaagattaataagaaaattccccggggaccaccatctcctcctgcacctgtaatgcattcctctagtcggaagatgactgtaaaggagcaacaagagtggaagatccccccttgtatttccaacatgaaaaacgcaaagggttacacaattcctctggataaacggctggctgctgatggaagaggacttcagactgtacacataaacgaaaattttgccaaactggctgaagcgctatacattgctgatcggaaggctcgtgaagctgtggaaatgatagcccaagtggagaggaagatggctcataaagaaaaggagaaacatgaagagaaactta

SEQ ID NO: 3710 - DNA, 584 bp, Cricetulus griseus; identical to SEQ ID NO: 68

SEQ ID NO: 3711 - DNA, 600 bp, Cricetulus griseus
cggaggcgcggggatagaaggagcaccatgtccgcggaagttcccgaggcagcgtcggcggaggagcaaaaggaaatggaagataaagtgactagtccagagaaagctgaagaagcaaagttaaaagcaaggtatccacacttgggacaaaagcctggaggttccgattttttaaggaaacgattgcagaaagggcaaaagtattttgattctggggattacaacatggcaaaagcaaagatgaagaacaagcagcttcctgcagcagccccagataagacagaggtcactggtgaccacattcccactccacaggaccttcctcagcggaaaccatccctggttgctagcaagctggctggctgattaaaagagctgaactgcatgagtcttctaatgtcctttatttctccttactacgttacttacccactttctgtttcctttcactcactatgtcatttgagactgacagctttgcaggtagtggtagtatgtgctgctgttgtaagggagcatacatgtgtagaggtttcggttagtttaacagtgcactgatgcaaaggacatgtaacagcaacttaagttacgataattgta

SEQ ID NO: 3712 - DNA, 543 bp, Cricetulus griseus
gagagcggtgtgtggagccttcggcttgggagkaaggcgctgtccgaacgaacargacccgagcggcagctgtgctcccgccttggaagtggttcaatcatggttgaaattaaraagatctgttgcattggtgcaggctatgttggtgggcccacatgcagkgtsrttgctcatatgtgccctgaaatcagggtaacagttgttgatgtcaatgagtcaagaatcaatgcatggaattctccaacccttcctatttatgagcctggattaaargaagtggtakaatcctgtcgagggaaaaatctgtttttttctaccaatattgatgatgccatcagagaagctgacctagtatttatttctgtaaacacaccaacaaaaacctatgggatggrgaaaggccgggcarmawatctgaaatatattgaagcttgtgctcgacgcatwgtgcaaaactcawatggggtcaaaatcgtgactgagaaaagcacagtccctgtgcgggcagcatagagcatccgccgtttatttgatgccaacaca

SEQ ID NO: 3713 - DNA, 580 bp, Cricetulus griseus; identical to SEQ ID NO: 71

SEQ ID NO: 3714 - DNA, 600 bp, Cricetulus griseus
agaacaccagtgatgtcaggatcgcmgagacctctttctgcacgggcatacagcattgatggcccaaatacttcaaggcctcagagtgcccgcccctctattagtgaaataccagagagaactatgtcagttagtgatttcaattactcacggactagtccttcaaaaagaccaaatgcaagggttggttctgaacattctttattagatcctccaggaaaaagcaaagttcctcatgactggcgagaacaagtacttcgacatattgaggccaaaaagttagaaaagcatccccagacatccagtccaggagattcttgccaagatgatagattgatttcaggagagcagaactactcaccaggtgcacttagtcacaaagatcttccagacagcttgatgaaaatgcctttgagtaatggacagatgggccagcctctcaggcctcaggcaaattatagtcaaatacatcatccccctcaggcatctgtggcaaggcatccctctagagaacaactcattgattatttgatgctgaaagtggcccaccagcctccatatacacatccccattgttctcctagacaggctatgagctgg

SEQ ID NO: 3715 - DNA, 1184 bp, Cricetulus griseus; identical to SEQ ID NO: 73
  misc_feature (1029)..(1050): n is a, c, g, or t

SEQ ID NO: 3716 - DNA, 411 bp, Cricetulus griseus; identical to SEQ ID NO: 74

SEQ ID NO: 3717 - DNA, 600 bp, Cricetulus griseus
  misc_feature (562)..(562): n is a, c, g, or t
ttcggctttgggtgaaaaaaaatggcccgaaccaagcagaccgctaggaagtccacgggtgggaaagccccccgcaaacagctggccaccaaggcagccaggaaaagcgcgccctctaccggcggggtgaagaaacctcaccgctacaggcccgggaccgtggctstragagagatccgtcgctaccagaagtcgactgagctgctcatccggaagctgcctttccagaggttggtgagggagatcgcccaggatttcaaaacggacttgaggtttcagagtgcagccattggtgcccttcawgaggccagtgaagcgtacctggtggggttgtttgaagacaccaatctgtgtgccatccatgccaagagagtcaccatcatgcccaaagacatccakttggctcgccggatacggggggagagagcttaagtcaaggcggtttttatggcattttgtagtaaattctgtaaaatacttwrgtttaatttgtgactttttttgtaagaaattgtttataatatgttgcatttgtacttaagtcattccatctttcactcangatgaatgggaagagtgactgtgcagacctcagtgacg

SEQ ID NO: 3718 - DNA, 580 bp, Cricetulus griseus; identical to SEQ ID NO: 76

SEQ ID NO: 3719 - DNA, 600 bp, Cricetulus griseus
gaagccccaggctgagcggaaagaagaaaaaaargcagctgccccagctcctgaggaggagatggacgagtgtgagcaggcacttgctgctgagcccaaggccaaggacccctttgctcacctgcccaagagtaccttcgtgttggatgagtttaagcggaagtactccaatgaggacacagtgtctgtggcgctgccatatttttgggagcactttgataaggatggctggtccctgtggtatgctgagtaccgcttccctgaagagctcacccagactttcatgagttgcaacctcatcactgggatgttccagcgattggacaaactgaggaagaatgcctttgctagtgtcatcctctttggaaccaacaatagcagctccatttctggcgtttgggtcttccgaggccaagaacttgcctttccgctgagtccagattggcaggtggactacgagtcgtatacatggcggaaactggatcctggtagcgaggagacccagaccttggttcgagagtacttttcctgggagggggcctttcatcatgtgggcaaaaacttcaatcaaagcaagatctttaagtgaacatgttttgc

SEQ ID NO: 3720 - DNA, 540 bp, Cricetulus griseus
  misc_feature (90)..(113): n is a, c, g, or t
ctctccctctccctccctgctgctgccggcctccgggatccaaccgacgccatgggtttcggagacctgaaaacccccgcgggcctccannnnnnnnnnnnnnnnnnnnnnnncaagagctacatcgaggggtacgtgccatcgcaagcagatgtggccgtctttgaagccgtctctggtcctccgcccgctgacctgtgtcatgctctgcgctggtataaccacatcaagtcttacgagaaagagaaagccagcctgccaggagtgaagaaatctctgggcaagtatggccctgccagtgtggaagacaccacaggaagtggaactgcggatgctaaagatgatgatgacattgatctcttcggatcagatgatgaggaggaaagcgaagaagcaaagaggctccgagaagagcgccttgcacagtatgaatcaaagaaagctaaaaagcctgcggttgtcgccaagtcttccatctttctatatgtgaagcctcgggatgatgacacagacatgacataattagaggagcgtgtcaga

SEQ ID NO: 3721 - DNA, 579 bp, Cricetulus griseus; identical to SEQ ID NO: 79

SEQ ID NO: 3722 - DNA, 591 bp, Cricetulus griseus; identical to SEQ ID NO: 80

SEQ ID NO: 3723 - DNA, 600 bp, Cricetulus griseus
tgatttcttctgcyagttctctgttctttggcattttcttctctccctggacaggcatcgagttgcctgagtgtattcagagcactctggacttgctgtctargcatgttcctgtctcacagatgcagcgctcatgggctcggaactgctgtgtcactttatcgagcagagccaggtgcctctcttctgtgccctctagatcctctctctctacctctaccccaagtgcctctgccaccgtgacttcagaaaagcttggcagtccctctagcaacatcctaagttcagagattgtctggttggtgagttaatagctcagccgaatgctcacattgtctcagtgaggcaactactgaccaagatggttcattgttgcctctgtgagtcagagtagacagcacatttgtttttccttgcacgcttggcaagtggctctggctgattaatatatgcaggtggtggtacaaatgcttgtgaggttccccattttatccctgtacaaacaccagaagcgtgggcaattgcccaagaagaggccctgcttcctgaagccaggtgtgatgcaaagtttgaactgaaatgtggtagctcaggtgacac

SEQ ID NO: 3724 - DNA, 600 bp, Cricetulus griseus
  misc_feature (80)..(99): n is a, c, g, or t
aagttcagtgtctagaggcacagctcccagtgataatagggtgacgtccttcagagaccttattcatgaccaagatgagnnnnnnnnnnnnnnnnnnnngacagaggagcaggttttatgctgggggctcaragagaagtggacagcagattgttggtsctccccggaagagaagtcccaacgagctggtggatgatctgtttaarggtgccaaagagcatggggctgtasytgtggagcgagtgaccaagagccctggagagaccagkmaaccgakaccatttgcaggakggggctaccgccttggagcagcaccagaggaagagtctgcctacgtggcaggagaawrgasgcgacattcgggccawkatgtycatgyagtgctgaagctctgsagawctggattcagccttgacaatggtgaactcagaagctaccaagacccatccaatgcccagtttctggagtctatccgtagaggrkwktgtgmmgcscaagggagcttysrawgccttmrctsrcgwgggcsrtraactggryagcacggccccccatgtattgaacaccagctctccagcccagcaagcagataatgaagcc

SEQ ID NO: 3725 - DNA, 605 bp, Cricetulus griseus; identical to SEQ ID NO: 83

SEQ ID NO: 3726 - DNA, 876 bp, Cricetulus griseus; identical to SEQ ID NO: 84

SEQ ID NO: 3727 - DNA, 595 bp, Cricetulus griseus; identical to SEQ ID NO: 85
  misc_feature (93)..(139): n is a, c, g, or t
  misc_feature (167)..(213): n is a, c, g, or t
  misc_feature (246)..(298): n is a, c, g, or t
  misc_feature (328)..(374): n is a, c, g, or t
  misc_feature (452)..(543): n is a, c, g, or t

SEQ ID NO: 3728 - DNA, 600 bp, Cricetulus griseus
tttgacaagttcaaatatgatgacgcagaaaggaaattctacgagcagatgaatgggcctgtgactgctggctcccgccaggagaatggtgccagcgtgatcctccgtgacattgcaagagccagagagaacatccagaaatccctggccggaagctcaggccctggggcctccagtggacctggtggagatcatagtgagctcattgtaaggattgccagtctggaagtggagaaccagaatcttcgaggcgtggtacatgatctgcagcagtccatttccaagttggaggtcaggctgaacactctggagaagagttcacctactcacagagccacagcccctcagacgcaacatgtgtctcctatgcgtcaagtggagcscccaaccaagaargcggccacaccggcagaggatgatgaggacgatgacattgacctgttcggcagtgatgaggaggaagaagataaggaggcagcccgactacsaraggagaggcttcgtcagtatgcagagaagawagccaagaaaccctcactggtggccaaatcctccatcctcttggatgtcaaaccttgggatgatgagacaaatatggcc

SEQ ID NO: 3729 - DNA, 585 bp, Cricetulus griseus; identical to SEQ ID NO: 87

SEQ ID NO: 3730 - DNA, 578 bp, Cricetulus griseus; identical to SEQ ID NO: 88

SEQ ID NO: 3731 - DNA, 600 bp, Cricetulus griseus
tctatatttaggagccatcacacttggggagaagaatagaaagaaaatgcagaaccctctcctcagaaaacgggagagtgaaaatatttctcgagctgtgtgtgctctcctcaactctggaggtggagcgatcaaggttaaaattgaaaatgaaaattatagcttcaacagggatggcctgggactggatttggaagcctctctttgtaaatgtctgccatttgtggggaggcacctagacttcatggagcagggaggatacttttacatctttgtgaaatcttggagtgcagacatctttgggctgccgattggcaccctgagaaccaatttgtacgtaagaacctggtcgtcctcagttgaagtggttgcctctgatgctcttgagttcctccaagaactggaggaaaatggagggagatcctgtgtcagaccagagcctcctgtatgtagagcctgccctggagtagaagaagaaagtctcctagaggacctggctgctgcagttttcaacaagacccaatttcagtaccaggaagacttccccttcaccaggtcaacctatgctgaagtgacattgctttcaaggaaacagctgca

SEQ ID NO: 3732 - DNA, 499 bp, Cricetulus griseus; identical to SEQ ID NO: 90

SEQ ID NO: 3733 - DNA, 600 bp, Cricetulus griseus
  misc_feature (175)..(194): n is a, c, g, or t
  misc_feature (571)..(571): n is a, c, g, or t
cgcykcygscymygkgtctckrcmctaggagtcttcgtcctckcccgaccgcgcaatggaaggktaccacaagccggatcakcakaakctgcakgccctgaaggacacakccaatcgcctgcgcatsakstccatccakgccaccaccsccsctggctccggccrccccacatcnnnnnnnnnnnnnnnnnnnntcatggctgtcttgtttttccataccatgcgctacaasgccctggatccccgaaaccctcacaatgatcgctttgtgctctccaagggccatgcagctcccatcctgtatgcagtctgggctgaagctggcttcctacccgagacagagctgctgaacctgaggaagatcagctctgacctggatgggcaccctgtcccaaaacaagccttcaccgatgkggccactggctccctgggccarggcctgggagctgcttgygggatggcctacacaggcaaatacttcgacaaagccagctatcgtgtctattgcatgctgggagatggagaagtgtctgagggctctgkctgggaggccatggsctttgccggaatntacaagctagacaacctccttgccatttt

SEQ ID NO: 3734 - DNA, 600 bp, Cricetulus griseus
  misc_feature (313)..(357): n is a, c, g, or t
  misc_feature (493)..(508): n is a, c, g, or t
ccatcttcttcactagaaatggctcatgtgctctgtaacagggccaggctggtttcctatctcccaggattctgttctttagtgaaaagagttatcagtccaaaagccttttcaactgcagggtcttcaggttctgatgagtctcatgtggccactgcacccccagatatatgttcccgaacagtgtggcctgatgaaactatgggaccatttggccctcaggatcagaggttccagcttcctgggaatatgggcttcgattgtcacctcaatgggactgcttcacagaagaaaagcctgacccataaaactnnnnnnnnnnnnnnnnnnnnnnnnnnnnnnnnnnnnnnnnnnnnntttgtgatggctcaktatgtgaacgagtttcagagtagtgatgcacctgtcgaacaagawattaacagtgcagaaacttactttgaaagtgccagagttgagtgtgtaatccagacatgtccagaactgctgcaannnnnnnnnnnnnnnntttttccagaagtggctaataacaaactaatgattctgactgtracacaggaaactgaaaatgacatgactgcttggagtgaagaggtatat

SEQ ID NO: 3735 - DNA, 600 bp, Cricetulus griseus
  misc_feature (557)..(557): n is a, c, g, or t
tctgcagtggcctttcgtgcacagtacttccagcagccaacatgcgtttcttttctgttgctttgttttgttttaggaaaacacttttctccctgacagtttatagatgttgataaatgtcctgtcattctggtcaggagacggtcatgatgaccattggcccagggctccaactctgtggcttagacctcttttctaaaataatggtttttctgcatggcagtcctgtcagaaggtgtcaaaagcattctcaagygctgcctatgacattcttagaattttctggtattacacagttccacacaaatgttcctgctgtgtgaacagagacttctcctccatcctggtagttaaatgatgtcacagggaggcctgcrttggtcawgctggccttctcagtgactcagggatcattctgcatccgtgcatacatgcaccagatatgatgttctctgggcaaacaggccctttcctgtctgtcctgggcacttgtttatctacagcttctcctttctttgccttcgacacatcttatggactatgtatgtattatccangcttgatggaaactggtgcttgtagtcaggtctgtaaagcctt

SEQ ID NO: 3736 - DNA, 567 bp, Cricetulus griseus; identical to SEQ ID NO: 94

SEQ ID NO: 3737 - DNA, 600 bp, Cricetulus griseus
atgaakgcaaakaaaacatcagakctgctgttgcakcgggatgcaygcaggttcaagacctggagctgccttcaktggaggtggatccctgyggagatgctcakgctgctgcagaakgagccgtgcttggtctctatgagtyygatgacctaaakcagaaaaagaaggtggctgtatcagcgaagctctatggaagtggcgatcaakakgcctgggagagaggggtcctctttgskkctgggcagaacttggcccgccagctgatggagtctccatccaatgagatgacaccaaccagattcgctgaaattattgaaagaaatctcaaacatgccagtagtaaaacagaggtccatatcagacccaagtcttggatagaggaacaagaaatgggctcgttccttagtgtggccaaggggtctgaagaaccaccagtcttcttggaaatccactacacaggcagccccaatgcaagtgaagcacccctggtgtttgtgggaaagggaattacctttgacagtggaggtgtctccatcaaggcttctgcaaatatggacctcatgcgggctgacatgggaggagctgcaacaatatgctcgg

SEQ ID NO: 3738 - DNA, 835 bp, Cricetulus griseus; identical to SEQ ID NO: 96
  misc_feature (412)..(460): n is a, c, g, or t
  misc_feature (517)..(563): n is a, c, g, or t

SEQ ID NO: 3739 - DNA, 600 bp, Cricetulus griseus
agaacatcatcctggmrgagggcaasgakatcctggtgggagatgtggggcagactgtggacgacccctacaccacttttgtcaakatgctgcccgacaaggactgccgctatgctctctacgacgcaacctatgagaccaakgakagcaagaaggakgacctggtgttcatcttctgggcccctgakagtgcaccccttaagagcaaaatgatctatgccakctccaakgatgccatcwagaagaagctgacaggaatcaagcacgaattacaagcaaactgctacsakgaggtcaasgaccgctgcaccctggcakawwaactadgtggcagcgccgtcatctctctggwrggcaagcctttgtgakccgcctccadccccctgcctggagcatctakcakccccagacctgctcatgggtgttgcaggctgccccttttcctgccagaccggaggggctggggggatcccagcagggggagggtaatcccttcaccccagttgccaaatgtcctccccaccccctggaccgtgctcttccctccaccctgacggttctggccatcccaaactgcttctgatcctctgattcctcttg

SEQ ID NO: 3740 - DNA, 419 bp, Cricetulus griseus; identical to SEQ ID NO: 98

SEQ ID NO: 3741 - DNA, 580 bp, Cricetulus griseus; identical to SEQ ID NO: 99
  misc_feature (417)..(470): n is a, c, g, or t

SEQ ID NO: 3742 - DNA, 466 bp, Cricetulus griseus; identical to SEQ ID NO: 100

SEQ ID NO: 3743 - DNA, 540 bp, Cricetulus griseus
  misc_feature (69)..(99): n is a, c, g, or t
cccggtctataagagctagttccaggacagcctccaaagccacgggaaaaaccctgtcttggaaggaannnnnnnnnnnnnnnnnnnnnnnnnnnnnnnaaggaaggagggaaggaagggagaaagagagaaagagagaaagagagaaagagagagaagaaaagaacttcaagttaattatattaaaatgtttaatctctataaatatgaaatgaattaaagataaaattttctcctgaaatttaagtgcacttttaaagataagcacttttgatgtctgattgagcaaacataaaacagacaaaaaccacccccaaccacttcgcccttcaaagctaacggatcaaatgtacaaagtgcataaattrgattctcttgagtacttcaagcatcttgaagkgaggactgggaagatyaccagggaaaatagacrgatcaaatgtagtcaataagagccctctcttttccatgggtaacagtaaaaagatttgtcaatgcgggagacaaaggccagcaagatagaccatagacttagacccc

SEQ ID NO: 3744 - DNA, 600 bp, Cricetulus griseus
caactgaggtgctggaaaagagaaataagattcgggaacagaaccgatacgacctgaagacagcaggaccacagtctcagctgctcgcaggaattgttgtggacaagcctccttctaccatgcaatttgaagatgatgatcagggcccaccagctcctcctaacccattcagtcatctcacagaaggggaccttgaagaatacacgaagacaatcgaaagawagcaacgaggcctggacgamrctgagcwgkwktcmctctcagatgatgcagcatctgtttcacaaattcagtctcagactcaatcaccgcaaaatgtccctgaaaaattggaagaaaaccatgagctgttttccaagagcttcacttccatggacgtgcctgtcatgattgtgaacggcaaggatgagatgcacgatgctgaagatgagcttgctcagcgggtcagtaggttaaccacaagctcgaccatagagagcatcgagatcaccattaagtctccagagagaacccaagaggtcatgtcacctgatggctcgccttcaaagtcaccatccaagaaaaagaagaaattccgcacaccttcttttctcaaaaaga

SEQ ID NO: 3745 - DNA, 579 bp, Cricetulus griseus; identical to SEQ ID NO: 103

SEQ ID NO: 3746 - DNA, 581 bp, Cricetulus griseus; identical to SEQ ID NO: 104

SEQ ID NO: 3747 - DNA, 600 bp, Cricetulus griseus
ggccctggtcgtactccatttgggaatccattaargacttctttgatactgagatcaagaaactcggtgttgagaactgctacttccccatatttgtgtctcargctgctytagagaaagaaaagagtcacaytgaggactttgcccccgaggttgcttgggttacaagatctggtaagacagagctggcagagccaattgccatccgacctactagtgaaacagtaatgtatcctgcatatgcaaaatgggtgcagtcccacagagacctgcccatcaggctcaaccagtggtgcaatgtggtgcgctgggagtttaagcacccacagcctttcctccgcactcgggagttcctgtggcaggagggacacagtgcctttgctaccttcgaggaggcagctgacgaggtcatgcaaatccttgagttatatgctcgagtgtatgaagagctcttggcaatccctgttgtgagaggaagaaagactgaaaaggagaagtttgcaggaggagactatacaaccacagtagaagccttcatatctgccagtgggcgtgctatccagggagcaacatcacaccacttaggccagaatttttcca

SEQ ID NO: 3748 - DNA, 576 bp, Cricetulus griseus; identical to SEQ ID NO: 106

SEQ ID NO: 3749 - DNA, 269 bp, Cricetulus griseus; identical to SEQ ID NO: 107

SEQ ID NO: 3750 - DNA, 500 bp, Cricetulus griseus
  misc_feature (203)..(223): n is a, c, g, or t
caacttagtgttttgttgagtaactaactgttttgcaagaaatatttccatttagaaacataaaagattaatgttccaattatgcatagcttccccattatcaatcaggagagattatggggcacttgggaactattttgtctttataacaggcgtttgcaaggctgagcataatagataaatcagttccctctgaaagtgtnnnnnnnnnnnnnnnnnnnnngaaaaaaagagccaggtggkcaaacttaaattaacatcatcttgttaaagcatattttatttcactgagagaaattcaatatcaaagacttttatatactcaattaccaagaaatctttttttaagtacaatttaaaaatcattgaaaatgtgatccacatcatagccattcttttcctcaaacttaggtggacaagcttctcawagtggcagtgggaactggcatgtcacaaawwacgtartartgcttwcargcagtttgcccctgtaagaacca

SEQ ID NO: 3751 - DNA, 600 bp, Cricetulus griseus
  misc_feature (89)..(111): n is a, c, g, or t
  misc_feature (270)..(314): n is a, c, g, or t
gcgggggccacatccttgtgctttgtgtaccctcttgattttgcccgtacccgtctagcagctgatgtgggtaaagctggagctgaaannnnnnnnnnnnnnnnnnnnnnntgcctggktaaratctacaaatctgatgggattakgggccygtaccaaggctttaatgtgtcagtacagggcattatcatctaccgagctgcctactttggtatctatgacactgcaaagggaatgcttccagatcccaagaatacccatatcttcatnnnnnnnnnnnnnnnnnnnnnnnnnnnnnnnnnnnnnnnnnnnnnttcctatccttttgacacggttcgtcgacgtatgatgatgcagtctggacgcaaaggaactgatatcatgtatactggcacaattgactgctggaggaagattgctcgtgatgaaagaagcaaggcttttttcaagggtgcatggtccaacgttctcaggggcatgggtggtgcctttgtgcttgtcttgtatgatgagatcaagaagtacacataattatgtcttaagtttctccccaagagcaggcatgttgtacaatacaccatatcttgaacattctggaca

SEQ ID NO: 3752 - DNA, 600 bp, Cricetulus griseus
cttggagtgatcgcctgcattggggagaagctagatgaaagggaggccggcaccaccgacaaggttgttttcgagcaaaccaaggccatcgcagataatgtgaaggactggaacaaagttgtcctggcctatgaacctgtatgggccattggtactggcaagactgcaacacctymacakgcccaggaagtacacgagaagcttcggggatggctgaaatccaatgtctctgatgcagtggctcaaagcacccgaatcatttatggaggttctgtgactggagcaacctgcaaagagctggcaagccagcctgatgtggacggcttccttgtgggtggtgcttccctcaagcctgagtttgtggacatcatcaatgccaaatgttaaacaccagcatcttccctaccctccgctaggccaggattaggttgcccaggagcttaagaactgctcccacaagtcacatgcttctgatgtcatcgccccatcttgtttgctaatccacactgtaccttcctacacctttgacacctcccttataaggttgggaccaggccaatccctttaccacttacaatgaatgaaataatgtcacctatt

SEQ ID NO: 3753 - DNA, 598 bp, Cricetulus griseus; identical to SEQ ID NO: 111
  misc_feature (32)..(46): n is a, c, g, or t

SEQ ID NO: 3754 - DNA, 600 bp, Cricetulus griseus
  misc_feature (214)..(256): n is a, c, g, or t
caaccatacagccacgcacattctgaacttcgccctgcgctccgtactgggggaagcggaccagaaaggctcactggttgctcctgatcgccttcggtttgacttcactgccaagggagccatgtccacccagcaaatcaaggtakgctgaggagattgtcaatgccatgattgaggcagctaagcctgtctatacccaggactgtcccctggnnnnnnnnnnnnnnnnnnnnnnnnnnnnnnnnnnnnnnnnnnngacctatactgaccctgtgcgagtcgtttccattggggtccccgtgtcagagctgttggatgacccctctgggcctgccggctccctcacttctgttgagttctgtggaggaacgcatctacggaattccagtcacgcaggagctttcgtgatagtgactgaagaagctattgccaagggtatccggaggattgttgcatgtcacaggtgctgaagcccagaaagccctcaggaaggcagagagcttgaagagatctctgtctgtcatggagaccaaagtgaatgcccagactgcacccaacaaggatgtgcagcgggagattgccgaccttggtgaggccctg

SEQ ID NO: 3755 - DNA, 600 bp, Cricetulus griseus
tcggctcaacagagataaccttcataccagagaagatcagaggtggaatcctcactgcakatacgaakacagcagggagtgtgtgcctcttgatgcaggtttcaatgccttgtgttctgtttgctgcttctccatcggagcttcgcttgaaaggtggaactaatgctgaaatggcacygcagattgatyacaccatgatggttttcaagccaatcgtygagaaatyyggtkycaaatttgattgtgacwtyamaatgaggkgctattactccawawgggggcggygaggtkattgycckwatgtcaccarttaaacaktyskacccaataaatctgactgatcgtggctctgtgaccaagatttatgggagagcttttgttgctggagttttgccattaaaagtagcaaaagatatggcagcagcagccgtacgatgcatcagaaaggagatcagggatctgtacgtcaacatccagcctctgcaggagtccagggaccaagccttcggcaacgggagtggaatcatcattgttgctgagacatctactggctgcttgtttgctggctcatcacttggcaaaagaagtgtgaatgcagac

SEQ ID NO: 3756 - DNA, 564 bp, Cricetulus griseus; identical to SEQ ID NO: 114

SEQ ID NO: 3757 - DNA, 600 bp, Cricetulus griseus
gcgtacaggatacttgaaggggtatactctagttgagtatgaaacatacaaagaggctcaggctgccatggagggactcaatggtcaagatttgatgggtcagccaatcagcgtcgactggtgttttgttcggggtccaccaaagggcaagaggagaggtggccgaagacgaagcaggagtccagaccggagacgtcsttgatagatcctctgttgcccargtggtctctacacgagtccatttggttatgctgccttgcataaatagggctagggtagaacttgtgtttatatttaatttcttaccctatctacttagtattgctttgagttaaaacctaataataaatgttccattttgttttctacatttaagattattttactgttctggagactgtttatagtaaggccttctgagtcactgggaagacatgtctgtctggagtgtaattctgagtttctagaggctcgggcagagattgttcatcatttctttttcttagaagaccagagagcaggggtagtgaggttcttaaggcattaaggagtgattcttacatactcttgtgagcaaatactatattagtgcttctcctc

SEQ ID NO: 3758 - DNA, 579 bp, Cricetulus griseus
  misc_feature (61)..(78): n is a, c, g, or t
gcctyctgaargacratgtgtattgcgagctggcagakwrgcacatccatcakatcgtgcnnnnnnnnnnnnnnnnnnaggaagggggcaaggtacggaggatcaccagtgaaggacagatcctggagcagccgctggaccccagtctcatcccaaagctgatgagcttcctaaaactggagaagggcaagtttagcatggtgctactaaagaagactctgcaggtggaggagcgttacccttatccggtcaggttggaggccatgtatgaggtcattgaccaaggccccatccgcaggatcgaaaagatcagacagaagggttttgtccaaaagtgtaaggcctcaggcttagagggccatgtgctccaggaagggaacaatggcggcgggggagcaggaagcacaggcctgggcagtgagaagaagaaagaggagccaaggagagcacaagtccaccccaccagagagcctcagagaaagctggccaccaccaaggcagccattacccaacctcccccaaccccaagggccactacccttcctcctgctccagtcacaacagctactcgggccacgt

SEQ ID NO: 3759 - DNA, 600 bp, Cricetulus griseus
agataatcaatgctgattcagaggaccccaaatacattatcaatgtgaagcagtttgccaagtttgtggkggatctcakcgatcaggtggcacctactgacattgaagaarggatgagagttggtgtggaccgaaataaataccaaattcacattccactacctccaaagattgacccaacagttaccatgatgcakgtggaagawaaacctgatgtcacmtacagtgatgktggtggctgtaargagcabattgagaaattgagagaagtagytgaaacccctctactccatccagagagatttgttaaccttgggattgagcctccgaagggtgttctgctgtttggtccccctggcacaggcaagacactctgtgctagggcagttgctaacaggactgacgcttgcttcatccgagttattgggtctgagctcgtacagaaatacgtcggtgagggggctcgaatggttcgtgagctttttgaaatggccagaacaaaaaaagcctgccttattttctttgatgaaattgatgccattggaggggctcggtttgatgatggtgctgggggtgacaatgaggtgcagagaaccatgt

SEQ ID NO: 3760 - DNA, 582 bp, Cricetulus griseus; identical to SEQ ID NO: 118
  misc_feature (412)..(412): n is a, c, g, or t

SEQ ID NO: 3761 - DNA, 600 bp, Cricetulus griseus
gccgtgagtcgccgcagcaacagctatggtgtcagtaatcaacaccgtggacacctctcatgaggacatgattcatgatgcccagatggactattatggcacccgcctadmaacctgctcstssgrcaggtccstcaaaatctttgatgtgcgaaatggagggcagatcctcattgcakaccttasaggacatgaggggccagtatggcaagtakcctgggcccaccccatgtrcsgcaatakcctgrcctcctgtksctatgaccggaaagttattatctggaargaggaaaatggcacttgggagaagactcatgagcactcaggacatgactsctsagtgaactctgtatgctgggcccctcatgattatggcctgattttggcctstgggakctcggatggggccatctccctgctgacctatacaggggaaggccaatgggaagtgaasaagattaacaacgctcacacgattggctgtaacgccstcagttgggcccctgctgttgtgcctggaagcctcatakaccaaccatcagggcagaagcccaattacatcaagaagtttgcatcaggtggctgtgacaacctcatcaa

SEQ ID NO: 3762 - DNA, 600 bp, Cricetulus griseus
accagaagcccctgatggattccccrykkcckaaattcctttttgcttttgactagcatttcaaccttctggggtccctaacttcgtcccaaagtcagcaggaagcagtttggaaaagaatttcgccgtccattttccckggttraaatgctaagtcaaaaggaactcccttrcatggggatgmcartatctatcactccctgatggggatgctagagagacagcaattccatgattggaatttacamaraaaagawaatgggggaatgaaggaaccrgcttccttttggcagccataayrgyygaacatgtgcttgcyatramcytgycytrgwmacgtagaggtcagatgcctgtctcgtgacaaggaaccttaktcacttaraggtcagatgcctgtcttgtgacaaggaaccaatcggaagttagctggtggcgctatgctttatggctctgggtgtgctttacggacaagcgcacagcaatgacgtagagagcatagcaaccaccctgggagggcctatgagccataacaaccagttgaccaatcaacacagggcaagccctccaagcctggaggcacaccaatcatgagcctat

SEQ ID NO: 3763 - DNA, 462 bp, Cricetulus griseus; identical to SEQ ID NO: 121
  misc_feature (321)..(341): n is a, c, g, or t

SEQ ID NO: 3764 - DNA, 600 bp, Cricetulus griseus
cccggagctgtctctcaccgagrwccactgccctttggtgcagacagaaagaacaagtagcaactaaacaggagaagaatggctttgaagcagatttccagcaataggtgcttcggggggctccagaaagtttttgaacatgacagtgttgagctgaaatgtaaaatgagatttgctgtctacctaccaccacaagcagagagtggaaagtgtcctgcactctactggctgtctggtttaacttgcacagaacagaatttcatatccaagtctgrctttcagcaagctgcctcagaacatggccttgtcgtcattgctccagataccagcccccgtggctgcaatattaaaggagaagatgacagctgggactttggcactggtsctgggttttacgtgamtgccactgaagatccctggaaaactaattacagaatgtattcttacgtaactgaggagcttccacaacttataaatgccaatttcccagtggacccacasaggatgtctatttttggtcactccatgggaggccacggagctctgatttgtgctttgaaaaatcctggraaatacaaatccgtgtcagcatttgctcca

SEQ ID NO: 3765 - DNA, 582 bp, Cricetulus griseus; identical to SEQ ID NO: 123

SEQ ID NO: 3766 - DNA, 1045 bp, Cricetulus griseus; identical to SEQ ID NO: 124
  misc_feature (839)..(856): n is a, c, g, or t

SEQ ID NO: 3767 - DNA, 600 bp, Cricetulus griseus
tggcagagaagaggagatgggtttgagaagggattagaaggagaatagatgagataccagagtccaaggtcccagcaggactggtraaaggaacctgccgactcagcagggagaatgaagattgatcagctattaaatccttaktagaggtaggcttatgaagaaggrcagggaaatgggattgaggtrtakaaagcaggcrcaagactagktgcttgctatagaatctgtkgattccaacagcctgtstgaattcacttacgagctcaagaaggartgtstagcatcacgctattgtagcttttgacttggagctggtccargctgaaagccagctgcagcctctctcgtgtkcacatctccagaccatctcacctctgccctgctgtggggagcaggcatggcagtaaaagtggcctgggctctctctttcagttcattgtttgcttttctgggaattagaargtrggcaccaagatccatggcagcgttacttcttctgcatggkatgcggtgaacccctctgctggcttacacagtgattcaagataacaagtcaatagaaactgccgaggtgggacagagtggagccagggagcc

SEQ ID NO: 3768 - DNA, 579 bp, Cricetulus griseus; identical to SEQ ID NO: 126

SEQ ID NO: 3769 - DNA, 480 bp, Cricetulus griseus
  misc_feature (44)..(80): n is a, c, g, or t
  misc_feature (174)..(192): n is a, c, g, or t
  misc_feature (217)..(239): n is a, c, g, or t
  misc_feature (293)..(305): n is a, c, g, or t
  misc_feature (307)..(319): n is a, c, g, or t
aacggctgggtaacacrgaksgssaccaccccgcagttcccaannnnnnnnnnnnnnnnnnnnnnnnnnnnnnnnnnnnncatgtggaagctaaccagggacgagaccaactatggcataccacagcgtgcgcttcgaggkcactcccattttgtcagwgatgtcgktatctcnnnnnnnnnnnnnnnnnnnctctcakgctcctgggatggaacannnnnnnnnnnnnnnnnnnnnnngggcaccaccacgagacgatttgtaggccatactaaggatgtactgagtgtagnnnnnnnnnnnnncnnnnnnnnnnnnntgtctggatctcgagacaagaccataaagttatggaatactctcggtgtctgcaaatacactgtccaggatgagagtcattcagaatgggtgtcttgtgtccgcttctccccgaacagtagcaaccctatcatcgtctcctgtggatgggacaagctggtc

SEQ ID NO: 3770 - DNA, 906 bp, Cricetulus griseus; identical to SEQ ID NO: 128
  misc_feature (641)..(668): n is a, c, g, or t

SEQ ID NO: 3771 - DNA, 600 bp, Cricetulus griseus
gatggaactggaagaggggaaggcaggcagtggactccgccaatattatctgtctaagattgaagaactccagctgattgtaaatgataagagccagaatctccgaaggctgcaggcacagaggaacgagctaaatgcaaaagttcgcctactgcgggaagagctgsrgctgctacaggaacagggctcctatgttggagaagtagttcgggccatggataagaaaaaggtgttggtcaaggtccatcctgagggcaaatttgttgttgatgtggacaagaacatcgacatcaatgatgtgacgcccaattgccgagttgctctaaggaatgacagctacactctgcataagatcctacctaataaggtggaccctctggtgtcactaatgatggtggaaaaggtgccagactcaacttatgagatgattggtgggctggacaagcagattaaagagattaaagaagtaatcgagctgccggtgaagcaccctgaactctttgaagcactgggcattgcacagccaaagggagtgcttctgtatggacctccacgcactgggaagacattgttggcccgcgctgtagctcatcatacgga

SEQ ID NO: 3772 - DNA, 579 bp, Cricetulus griseus; identical to SEQ ID NO: 130
  misc_feature (184)..(203): n is a, c, g, or t
  misc_feature (477)..(495): n is a, c, g, or t
  misc_feature (529)..(529): n is a, c, g, or t

SEQ ID NO: 3773 - DNA, 591 bp, Cricetulus griseus
attgttgatgctgagtggaacattctctatgacaagctagagaagatccatcagtctggagccaaagtcatcttgtccaaactccccattggggatgtggctacccagtactttgctgatagggacatgttctgtgctggccgagtgcctgaggaggatctgaagaggacaatgatggcctgtggaggctcaatccagaccagtgtgaatgctctgattccagatgtgctgggccactgccaattgtttgaagagacccaaattggaggcgagaggtacaatttcttcactggctgccctaaggccaagacgtgtaccatcatcctccgtggaggcgctgaacagtttatggaggaaacagaacggtccttgcatgatgctatcatgatcgtgaggagggccatcaagaatgactctgtggtggctggtggtggggccattgagatggagctctccaaataccttcgggattactcaaggaccattccagggaaacagcagctgttgattggggcatatgccaaggccctggaaattattccacgacagctgtgtgacaacgctggctttgatgcccaaacatccttaaca

SEQ ID NO: 3774 - DNA, 581 bp, Cricetulus griseus; identical to SEQ ID NO: 132
  misc_feature (500)..(517): n is a, c, g, or t

SEQ ID NO: 3775 - DNA, 580 bp, Cricetulus griseus
ccgtacctaactcargagaagctgattgagtactgccaatccaaaggcatcgtggtgaccgcgtacagtccccttggctctcctgacaggccctgggccaagcctgaagacccttctctcttggaggatcccakgattaaggcratkgcrtccaagtacaataaaacaacagctcargtgctgatccggttccccatacaaaggaacttggtggtgatccccaagtccgtgacaccagcaagaattgctgagaacctgaaggtctttgacttcgagctgagcaaggaggatgtgaccactctactcagctacaacaggaactggagggtgtgtgccttgatgagctgtgctaaacacaaggattaccccttccacgcakaagyctgaagcttcggatgcctgctctctcccacgagacttgcacctgctcttcctgtwtcatctgtccttgtgggtgtastgtagactgtgtccctctrcactgtsyggaacctggaagatcagacawcgagggtctgttagtttgatgtagtctccacagagcattatcagtagctgagtgattttcttcagcctttct

SEQ ID NO: 3776 - DNA, 582 bp, Cricetulus griseus; identical to SEQ ID NO: 134

SEQ ID NO: 3777 - DNA, 600 bp, Cricetulus griseus
  misc_feature (80)..(104): n is a, c, g, or t
tcggcaagaataagcgcctgacgaaaggcggcaagaagggcgccaagaagaaagtggttgatccattttcgaagaaagannnnnnnnnnnnnnnnnnnnnnnnnatgttcaatattagaaacattgggaaaacactagtcacgaggactcaaggraccaaaattgcatctgmtggcctcaagggtcgtgtgtttgaagtgasccttgctgatctgcagaatgacgaagttgcatttagaaaattcaagctaattactgaggatgttcagggcaaaaactgtctgactaacttccatggcatggatcttacccgggacaagatgtgctccatggtcaaaaaktggcagactatgattgaagcccatgtggatgtcaagacgactgatggttatttgctccgtctgttctgtgttggttttactaaaaaacgcarcaaccagatacgcaagacctcctatgcacagcaccagcakgtccgccagatccgcmagaagatgatggamatcatgacccgagawgkacagacaaatgacttgarrgaagkggttaataagttgattccwgacagcwktggkraagacmtatgaaaggcttgccgcg

SEQ ID NO: 3778 - DNA, 600 bp, Cricetulus griseus
tcctgcgctgtgggttcggktgscckrgcwgawrygctttgagcacctgtggcctggccatcaactcatcatgttcctggcscgcctgacttcacagctggtcagggctgttccttgggcaggtttcagtcgttcctggcctgcctctggggtgatcggcagssatgcttttccacccctttacaatttgcagcctgcaagccaaagtcgggctgcctccctccctggtaagggggcccakttggagcttgaggagttcctggtccccaggaagatgtccatcagtccattagagagttggctkactgctcggtatctattgcccakactggatgttggggtcccaatgactgtgattccctcccaaatctamgagtgtccacccagccaggaggaggaagccaagcagggagtcagggaagtctgggatgccactgcagtgcagtgcaaaaatgtgctgaagatccgaagacggaagatgaaccaccacaaataccgcaaactggttaagaggacacgatttcatcggcgtatagtgccggaaggacggctgaaaaagaagcagattaagtttgagaacgatttttaccccatcttgct

SEQ ID NO: 3779 - DNA, 584 bp, Cricetulus griseus; identical to SEQ ID NO: 137

SEQ ID NO: 3780 - DNA, 569 bp, Cricetulus griseus; identical to SEQ ID NO: 138

SEQ ID NO: 3781 - DNA, 596 bp, Cricetulus griseus
  misc_feature (547)..(561): n is a, c, g, or t
gcaacatgccccctggcattgagcccagccctgacaaaatgcttcagggtcgcctttttgcttatccggacactcaccgccaccgcctggggcccaactatctccagatacctgtgaactgtccctatcgtgctcgagtggccaactaccagcgggatggccccatgtgcatgcacgacaatcagggtggtgctccaaactactaccccaacagcttcagcgcacctgagcagcagcgctcakccctggagcacaggtcccagtgctccacagatgtgcagcgcttcaacagtgctaatgaagacaacgtcactcargtgcggaatttctatacgaaggtgttaaatgaggaggagaggaaacgcctgtgtgagaacattgctggccacctgaaagatgctcagctgttcattcagaagaaagctgtcaagaatttcactgacgtccaccctgactacggggcccgcatycaggctcttttggammaatataatgccgagaaagcctaagaatgcgattcatacctatacgcaagcgggctctcacnnnnnnnnnnnnnnnaaagctaaccctggaagctcaagggctcaccctgg

SEQ ID NO: 3782 - DNA, 425 bp, Cricetulus griseus; identical to SEQ ID NO: 140

SEQ ID NO: 3783 - DNA, 593 bp, Cricetulus griseus; identical to SEQ ID NO: 141

SEQ ID NO: 3784 - DNA, 600 bp, Cricetulus griseus
ttgctcgcgaaccacagcytgcggacatggcgaaccaggtgatcagatgcaaggctgcagtcgcctgggaggccggaaagcctctctccatagaggaagtakaagtggcccctccaaaggctcatgaagttcgaattaagrtyattgccactgccgtctgccacaccgatgcctataccctgagtggagctgatcctgaggggtgtttcccggtgatcttgggacatgaaggtgctggaattgtggaaagtgttggtgaaggggtgactagggtgaaggcaggtgatactgtcatcccgctttacgtcccacaatgtggagaatgcaaattttgtctgaatcctaaaacaaacctttgccagaagataagagtgactcakgggaaagggttaatgcccgatggcacgaccagattcacctgcaaaggaaagcctcttttccatttcatgggaaccascacatytctctgagtacacagttgtggctgacatctctgttgctaaaattgacccttcggcacctttggataaagtatgccttctcggttgtggcgtttcaaccggctatgggtgctgctgtgaacactggcaaggtggagcc

SEQ ID NO: 3785 - DNA, 362 bp, Cricetulus griseus; identical to SEQ ID NO: 143
  misc_feature (308)..(308): n is a, c, g, or t

SEQ ID NO: 3786 - DNA, 585 bp, Cricetulus griseus; identical to SEQ ID NO: 144

SEQ ID NO: 3787 - DNA, 565 bp, Cricetulus griseus
accatattgcgggcaactggatttgatggtggaaataaagctgatcaattagattatgaaaattttcgacatgttgtacataagtggcattacaaactaaccaaggcatcggtgcattgccttgagacaggsgmatatactcatatcaggaatatattgattgtgctaacaaaaatacttccttggtacccaaaagttttgaatctgggtcargcyttggaaagaagagtgaataaaatatgccaagaagaaaaaagagaagaggccagatctatatgcattggctatggggtaacacaattatactttaatgtgatttatgagactagattacagaaggattctgaagatgtgaaaatgttttacaatgttgaagtcttatcttctgctttacttcaggagattatgggagattatgcgatcatgttcccacaggctggtgagagttgtcacttctgattatcaacttccggtctatactggatgatagtttcaaaggccacatataatatttcttgaaatggaaaaatgcaattttgtgcgtagttactatatcttgaggagc

SEQ ID NO: 3788 - DNA, 600 bp, Cricetulus griseus
ggttcagccacagttggcctwaagtcaaaaacacatgcagtgttggttgcattgaagagggcacagtcggaacttgcagctcaccagaagaaaattctccatgttgacaaccatattggtatctcaattgcgggtctgactgctgatgctagactgttatgtaattttatgcgccaggagtgtttggattccagatttgtatttgacagaccacttcctgtgtctcgtcttgtgtctctaattggaagcaagacccakatcccaacacagcggtatggccggagaccctatggtgttgggctgcttattgctggttatgatgatatgggccctcacattttccaaacctgtccatctgctaactactttgactgtagagctatgtctattggagcccgttctcaatcagctcgtacttacctggagagacatatgtctgaatttatggagtgcaatttagatgagctggttaaacatggtctgcgtgccttgagagaaacactccctgcagagcadgacctgaccacaaagaacgtttccattggaattgttggtaaagacttggagtttacaatctatgatgatgatgatgtgtctcca

SEQ ID NO: 3789 - DNA, 579 bp, Cricetulus griseus; identical to SEQ ID NO: 147

SEQ ID NO: 3790 - DNA, 507 bp, Cricetulus griseus; identical to SEQ ID NO: 148
  misc_feature (51)..(63): n is a, c, g, or t
  misc_feature (66)..(88): n is a, c, g, or t

SEQ ID NO: 3791 - DNA, 600 bp, Cricetulus griseus
  misc_feature (500)..(500): n is a, c, g, or t
aacaaccttagtgaccctttgctattctattaggagccagcctccagctgaatccccctaccacctctccccctacctccatgatagtctgagcattgtttargccctaaccctgggctttgtctctcagtgaatagaatttatacctattacatatccttcctctctaggccctagccctaaattctgtttgtcagtcagtagaactcattcatattgtaaaggtcacaggtgctttactacttggcaagggaatttcaatgtagctagccctgaaactttgttttgagaattgtcatgcggagactttccccaaagttctactatgtttaaatgtgtggaaatattaaaacacagcatcagattctagaagtcttaatccaagtctgaccaagcccgatgcacagagttttcattctgtctttccttggtccactttcctagcatacctacaggaatgcctcaacagatgtcagcaattttagaagagttttggccgnttgtatttctgtttaatattcaagaactggggacatactgtggatgtagtagagtataaaacttggaaaacacaggtgttgaaagaaaaataagtatctt

SEQ ID NO: 3792 - DNA, 320 bp, Cricetulus griseus; identical to SEQ ID NO: 150
  misc_feature (99)..(120): n is a, c, g, or t

SEQ ID NO: 3793 - DNA, 588 bp, Cricetulus griseus; identical to SEQ ID NO: 151

SEQ ID NO: 3794 - DNA, 700 bp, Cricetulus griseus; identical to SEQ ID NO: 152

SEQ ID NO: 3795 - DNA, 580 bp, Cricetulus griseus; identical to SEQ ID NO: 153

SEQ ID NO: 3796 - DNA, 600 bp, Cricetulus griseus
atgatatataaaaaccaccgcaatcctagttactattattggtctttcaattgcactagaactaaacaacctaacttataaccttaaactaaatcttcaatcaccacaaaacctattctcaacctctttaggatattttacacttatcatacaccgtttactaccaataaaatatctaacaataagctttaatacagccatagctacacttgatctgacatgattggaaaaagcaatcccaaaaactatctcactatctaattacaaagcatcacaagctatcacaaaccaaaaaggcctcattaaactatactttatatccttcttaatctccctagtatcaatcccaattttattatttaatttccacgagtaatctcaataataataaacacacccataagtwaagttcacccagaaacaaccattaatcaagctgagcagctatataatgctgctacaccagctccaccctcacctatcaaccccagttcatcaccatcataaatcactcatcctcccatatcattaaaattcaaaattaactctacaccctcataatatttagtaacaaacgtcatacctaactctataaaaaaa

SEQ ID NO: 3797 - DNA, 578 bp, Cricetulus griseus; identical to SEQ ID NO: 155
  misc_feature (509)..(509): n is a, c, g, or t

SEQ ID NO: 3798 - DNA, 580 bp, Cricetulus griseus; identical to SEQ ID NO: 156
  misc_feature (519)..(519): n is a, c, g, or t
  misc_feature (535)..(535): n is a, c, g, or t

SEQ ID NO: 3799 - DNA, 570 bp, Cricetulus griseus; identical to SEQ ID NO: 157

SEQ ID NO: 3800 - DNA, 579 bp, Cricetulus griseus; identical to SEQ ID NO: 158
  misc_feature (237)..(251): n is a, c, g, or t
  misc_feature (464)..(476): n is a, c, g, or t
  misc_feature (478)..(495): n is a, c, g, or t
  misc_feature (522)..(541): n is a, c, g, or t

SEQ ID NO: 3801 - DNA, 600 bp, Cricetulus griseus
agcatgaagattaatggaagaatttcagcatccacattctcttccgatagtaagcggatatatacgtcttctgggaatggagaagtttatgtgtgggatgtgaattcaaggaagtgcattaacagattttttgatgaaggcagtttgtatggattaagcattgctacgtcaaagaatgggcagtatgtggcttgtggttctaagagtggagtggtaaacatatacagtcaagattcttgcctccaacaaacaaacccaaagccaataaaagctataatgaacctggtcactggtgttacttccttggcattcaatcccactacagaaatattggcagtggcttcaagaaaaatgaaagaagctgtcagattggttcatcttccttcctgtacagtattttctaactttccagtttttaaaaagagtactgtttctcgtgttcaaaccatggatttttctcccagaagtggatacttcgccttggggaatgagcagggcaaggccctgttgtataggttacaccattactcagacttctaaagatgtttttcttgaaattcaattgaacccatgtcagtacatcttccccagaattttcaa

SEQ ID NO: 3802 - DNA, 587 bp, Cricetulus griseus; identical to SEQ ID NO: 160

SEQ ID NO: 3803 - DNA, 580 bp, Cricetulus griseus; identical to SEQ ID NO: 161
  misc_feature (167)..(184): n is a, c, g, or t

SEQ ID NO: 3804 - DNA, 583 bp, Cricetulus griseus; identical to SEQ ID NO: 162

SEQ ID NO: 3805 - DNA, 577 bp, Cricetulus griseus
  misc_feature (181)..(199): n is a, c, g, or t
  misc_feature (340)..(370): n is a, c, g, or t
ggggaatactggagactgctagagatcttttgcagtgtctgtggacctttcgagagtgaattattctcataatcagagccctgctttaatggagtaccttcaagggagggtcttcaacctcttgttaggtcctgtctcatcaagctgtgatgtcttcgttcctagatctctctggactggnnnnnnnnnnnnnnnnnnngggccaggaggacatctgaaagcttggaagcctgggagtgagttagatgcctttgggctattgtttggttgacagtggtaaagtcttccattagccctggcctaatgctttatgaaagagccaacggtggctgaaggtggnnnnnnnnnnnnnnnnnnnnnnnnnnnnnnngattcatacactgagtcatgggcttcacaggaaacagcaagggtaatgaacatgctcccatcacagtcctgtctgaatttatgttatcgtgtctggagggtgttcawggggtatacctggatcttgttgaaaatataagccatctatggtttctaatttggatggktttgttataaaggagctcagagygctcatttgaaagaattc

SEQ ID NO: 3806 - DNA, 584 bp, Cricetulus griseus; identical to SEQ ID NO: 164
  misc_feature (343)..(362): n is a, c, g, or t

SEQ ID NO: 3807 - DNA, 578 bp, Cricetulus griseus; identical to SEQ ID NO: 165

SEQ ID NO: 3808 - DNA, 600 bp, Cricetulus griseus
agmagaagcggaaacagctcaaaagggccaagatggccaargatcgcaagagccgcawgaagtcttcadaggcgaagaarggtaaagatscaaatgcccctaagakgcctatgtctgcatacatgttgtggcttaatgccmrccragagaagatcaagtsakaccatsctggsrtsarcmtcacagatctttctwagaargcaggcgagatctggaagggaatgtcccaagagaagaaagaggagtgggacccaaaggctgaggatgccaggagggaatatgaaaaagccctgaaagaatatgaaggaggaagaggtgaatcttctaaaagggacaagtctaagaagaaaaagaaagtaaaagcaaagatggaaaaaaaatccactccctctaggagttcatcatccaagtcttcatcaaggcagctaagtgagagcttcaagagcaaagaatttgtgtccagtgatgagagctcttcatgagagaacaagagcaaaaagaagatgaggcggagcgaggactctgaagaagaggaactagccagcactcctccaagctcagaggactctgcctcaggatctgatgagtagaggaagaaaa

SEQ ID NO: 3809 - DNA, 580 bp, Cricetulus griseus; identical to SEQ ID NO: 167

SEQ ID NO: 3810 - DNA, 579 bp, Cricetulus griseus; identical to SEQ ID NO: 168

SEQ ID NO: 3811 - DNA, 579 bp, Cricetulus griseus; identical to SEQ ID NO: 169

SEQ ID NO: 3812 - DNA, 579 bp, Cricetulus griseus; identical to SEQ ID NO: 170

SEQ ID NO: 3813 - DNA, 579 bp, Cricetulus griseus; identical to SEQ ID NO: 171
  misc_feature (89)..(103): n is a, c, g, or t

SEQ ID NO: 3814 - DNA, 579 bp, Cricetulus griseus; identical to SEQ ID NO: 172

SEQ ID NO: 3815 - DNA, 579 bp, Cricetulus griseus; identical to SEQ ID NO: 173

SEQ ID NO: 3816 - DNA, 580 bp, Cricetulus griseus; identical to SEQ ID NO: 174

SEQ ID NO: 3817 - DNA, 533 bp, Cricetulus griseus; identical to SEQ ID NO: 175

SEQ ID NO: 3818 - DNA, 579 bp, Cricetulus griseus; identical to SEQ ID NO: 176

SEQ ID NO: 3819 - DNA, 580 bp, Cricetulus griseus; identical to SEQ ID NO: 177

SEQ ID NO: 3820 - DNA, 633 bp, Cricetulus griseus; identical to SEQ ID NO: 178

SEQ ID NO: 3821 - DNA, 589 bp, Cricetulus griseus; identical to SEQ ID NO: 179
  misc_feature (109)..(109): n is a, c, g, or t

SEQ ID NO: 3822 - DNA, 542 bp, Cricetulus griseus
ttgacttttttgaagacattgattcagatgaagatgagggagggctgtttggacgtcagaagattaagtcaagcaaaagttccaggaatctgaaatacaaagatttcttcaatccagttgaaagtgatgatgacatcgctagtgtcgtttatgatgacttadgttctaacaaagaggaagaatttgctgargaagcagaagaaagcatttctgaaatggatgaagataacgacctggaakaaagtgagggtggcgagcaacttaaagaargctcgaaaagagtaaccttcgctttgccagaggatgaggctgaagacacgagtcccttagctgtaaagcaagaatctgatgaagttaaatcctcttttgaaaagagacaggagaagatgaatgagaaaattgcatctttggaaaaagaattgttggagaaaaagccttggcagcttcaaggggaagtgacagcacasaagcggccagaaaacagcctgctggaagagacactccactttgaccatgctgtcagaatggcacctgtaatcaca

SEQ ID NO: 3823 - DNA, 579 bp, Cricetulus griseus; identical to SEQ ID NO: 181

SEQ ID NO: 3824 - DNA, 600 bp, Cricetulus griseus
ggggtgtgctggcggctggcggagtgagactttggcagacatggctcccagctcgctggctcccgaacccgagagtcggaagggtatccgggcggtgctgctggggccgcccggggctggcaaggggacccaggcacccagattggctgaaaacttctgtgtctgccatttggccactggggacatgctgagagccatggtagcttcaggttctgagctggggaaaaagctgawggccacgatggatgctgggaaactggtgagtgatgaaatggtcgtggagctcattgagaagaatttggagagtccttcatgcagaaacggctttcttctagatggcttccctcggactgtgaggcaggctgaaatgcttgatgacctcatggagaagaggaaagagaagcttgattcggtgattgaattcagcattccagactccctgctgatccggaggatcactggaaggttgattcaccccaatagtggccggtcgtaccatgaggagttcaaccctccaaaggagcccatgaaggatgacatcactggagagcccctgatccgaagatcagatgacattgagaaggccttgaagatccgcct

SEQ ID NO: 3825 - DNA, 600 bp, Cricetulus griseus
tacaacaggaacttggcaggccgcaatgacgcaaaccctgagacccatgcttttgtsacatccccagagattgtcacagccctggccattgcaggaacccttaagttcaacccadaaaycgacttsttgacaggcaaggatggcaagaagttcaagctggaagctccagatgcagatgagcttccccgatcagactttgacccakggcaggacacctaccadcaaccccccaakgacagcagtgggcarygggtakacgtgagccctaycarccagcgcctgcarctcttggagccttttgacaagygggacggcaaagacctggaggacctgcaaatcctcatcaaggtcaaagggaagtgcaccaccgaccacatttctgctgctggcccctggctcaagttccgtggacatctggacaacatctctaatracctgctcattggtgccatcaacattgaaaacggcaaggccaactccgtgcgtaatgctgtcacccaggagtttggccctgtgcctgacactgctcgatactacaagaaacatggcatcaggtgggtggtgattggagacgagaactatggtgaaggctcaagccgg

SEQ ID NO: 3826 - DNA, 518 bp, Cricetulus griseus; identical to SEQ ID NO: 184
  misc_feature (173)..(201): n is a, c, g, or t

SEQ ID NO: 3827 - DNA, 535 bp, Cricetulus griseus; identical to SEQ ID NO: 185
  misc_feature (467)..(481): n is a, c, g, or t

SEQ ID NO: 3828 - DNA, 600 bp, Cricetulus griseus
  misc_feature (335)..(360): n is a, c, g, or t
  misc_feature (435)..(456): n is a, c, g, or t
tttcttgatcatggatggtgaagatataccagacttttcaagtttaaaggaagaaactgcttattggaaggaactttccttgaagtataagcaaagcttccaggaagctcgggatgagctagttgaattccaggaaggaagcagagaattagaagcagagttggaggcacagttagtacaggctgaacaaagaaatagagacctgcaagctgataaccaaagactgaaatatgaagtggaggcattaaaggagaaactagagcatcagtatgcacagagctacaagcaggtctcagtgttagaagatgacttaagtcagacccgggccattaaknnnnnnnnnnnnnnnnnnnnnnnnnngctggagcaggccaatgatgacctggagagagcaaaaagggcaacaatagtttcactggaagattttgaacaaannnnnnnnnnnnnnnnnnnnnnaaatgcatttttagaaagtgaacttgatgaaaaggaatctttgttggtctcagtacaaaggttaaaggatgaagcaagagatttatagcaagagctagcagttcgggaacgacaacaggaagtgacccgcaaatctgctcctag

SEQ ID NO: 3829 - DNA, 581 bp, Cricetulus griseus; identical to SEQ ID NO: 187

SEQ ID NO: 3830 - DNA, 600 bp, Cricetulus griseus
aacatgctaagcattaggagattcctaacagtcccttaattaccagacagcctgtgagaggacaaaggctgaccatccacctgtgckgagtagctagctccttctagaagggatagcgtttagaagttgctttggtttgaactgtccccaggatgccacagaagagcagggcacatcttggaggcggctagggcaagttgtgtgcctaccaagatagactcccctakcagctagacaggctgggagtatatgtagctgtcctggatccccttctgttgctagcaggataagtgaccactcagagggagcttaatagttttcttatagtctagctctttgggggacctaccattctgtgccttgagagctgtaggaccaacagactaagatyggatggctytcacaaagagagcagatgagcttyctctacgygggtgggctgtggggacaggactgggaggatcacactcgtaccttatgtcctgtaaattctgattctctattccaagagggtataccggaggtgcggaaactggaggtagcaatattaattcttaagtatgcacctgactttctatccccatagggttcctctgttgc

SEQ ID NO: 3831 - DNA, 538 bp, Cricetulus griseus; identical to SEQ ID NO: 189

SEQ ID NO: 3832 - DNA, 580 bp, Cricetulus griseus
  misc_feature (394)..(414): n is a, c, g, or t
gtccattattaatcagagagggaaaattggacccttgatgatacaaagctaccaagtggtgaagctgaaactgattaggcgcagccttctaactaataatggactgtgattgctagtaaaaatctcccgcggcatttattaaatggacaattcctgggcagtaactgtggagattctgagtgggtctargatgtagccacggatttatttttagcagataggtgggttttgtaagggaaattcatgaaatgttactattaacagtcatggtggaccttcgcaactatttatatttggttattttatttgtactggtttgctgtttaaaattctttccaggtgtargtggcaaatgcttttaatcccagcactcatgagacagagtcaggcagcnnnnnnnnnnnnnnnnnnnnncttggactacagagcaagtgccaggattggctccaaagctacacatagaaaccctgtcmcaaaacamacawtaaatcagagcatatttcttatgcttttccctataacctgtaagcgccatacataattaacttattgaagcttctgtaacccttacactgggaca

SEQ ID NO: 3833 - DNA, 598 bp, Cricetulus griseus
  misc_feature (109)..(128): n is a, c, g, or t
atatttgacattgatgaagctgaagaaggtgtaaaggatcttaagattgaaagtgatgctccagagccagctgagccagaggatgacctggatattatgcttggcaatnnnnnnnnnnnnnnnnnnnntgtcaaattcccagatgaagatgaaatactagaaaaagacgaagctttagaagatgaagacagcaaaaaagacgatggcatttcattcagtaaccagactgggcctgcttgggcaggctcagaaagagactatacatatgaggagttgctgaaccgagtgttcaacatcatgagagaaaagaatccggatatggttgctggagagaagaggaaatttgttatgaaacctccacaggttgtccgagtaggaaccaagaaaacttcttttgtcaattttacagatatctgtaaactattacatcgtcaacccaaacatctcctcgcatttttattggcagaattgggtacaagtggttctatagatggtaataaccagcttgtaatcaaaggaagattccaacagaaacaaatagaaaatgtcttgagaagatatatcaaggaatacgtcatttgtcacacatgccgatcac

SEQ ID NO: 3834 - DNA, 600 bp, Cricetulus griseus
  misc_feature (447)..(461): n is a, c, g, or t
gatgaaaagaggcagttaagcctggatatcaataagttacccggggagaagctaggtcgagttgtacatatcatccaagccagggagccctctttacgtgattcaaacccagaagaaattgagattgactttgaaacactcaagccatccacacttagggagcttgagcgatacgttttatcctgccttcgaaagaaaccccggaagccctacaccattaagaaacctgtggggaagacaaaggaggagctagccctggagaagaagcgggaactagaaaagcggttgcaagacgtcagtggacagcttaactccaccaaaaaacctcccaagaaagcgaacgagaaaacagagacgtcgtctacgcagcaagtggcagtgtctcggctcatcgcttccagctccagctcagattccagctcctcgtcctcgtcttcatcttcttcnnnnnnnnnnnnnnnggactcgggctaaggggccaggccagatgggaaaggaaggctcggcaggaccggacccctgtaccacccttccccaccacttccccttgctgtgacacttctgcatctcatccctccataggagagctggctctgcagg

SEQ ID NO: 3835 - DNA, 522 bp, Cricetulus griseus
aatgctttccakttacacackaactgaaaactgtgtaagatttcctttgtgcactgtgtgctctgtgagagggcctgtcaagcakagcagaraggaggcaaggctgatccasgctgcttctctgcaagctgastcaaagcatgagatacattattccaactcagatgtatttggacactcatcatacatcakacctaatgagatctastakatggatatgtgtggtatgcaaattagaggccttctcatcctctggaaatattasagtasaggasaatgggtaaaaccaaatatgctctaactcaatcagttagacatattcatgaagggaatggtaagtacggscagcttacttagtgtggggcatctcctawgtctgagaactcaagcccatcaattagtcacccacaaaagtaaccagagcattggaagaactgttaataccagagtccttagtaggtagcataaaacattatgcactacttggagttgttatgtaaaattctatcttcagggtccctc

SEQ ID NO: 3836 - DNA, 271 bp, Cricetulus griseus; identical to SEQ ID NO: 194

SEQ ID NO: 3837 - DNA, 520 bp, Cricetulus griseus; identical to SEQ ID NO: 195
  misc_feature (226)..(240): n is a, c, g, or t

SEQ ID NO: 3838 - DNA, 582 bp, Cricetulus griseus; identical to SEQ ID NO: 196

SEQ ID NO: 3839 - DNA, 519 bp, Cricetulus griseus; identical to SEQ ID NO: 197

SEQ ID NO: 3840 - DNA, 600 bp, Cricetulus griseus
actactaaagtgtgtagaagctgagattgcaaactatgaggcttgtctcaaggaggaggtggagaaaaggaagaagttcaagattgatgaccagcgaaggactcacaactacgacgagtttrtstgtaccttcatatctatgctggctcaggaaggtatgcttgccaacctagtggaacagaacatctcaktgcggcgccgccaaggggtcagcattggtcggcttcacaagcagcggaagcctgaccgacggaaacgctctcgcccctataaggccaaacgccagtgaggacctctggccctgattctgcagcctctcttgccacaaggctcttaccaagtcccctccctatcccacttttttccccccagtattactgaatagttcagctagatcccakgccctgggagtgggaataagctgtgtgtcctgctttattatgctctggggcctggcaggggtaagtcagccccataatgctcaggaagcagcagttagaattggagggtgctgtggcctccacaaccatctatggaacagcagtacctggccttgttgcctgggcagcagaatatacattttacctactggagatgtct

SEQ ID NO: 3841 - DNA, 600 bp, Cricetulus griseus
cctctgtctttgagaaatactttcagttgcaagaagagggcaaggaaggagagaacagagcggtcatccattaccgggacgatgagaccatgtatgttgaatctaaaaaagacagagtcacagtagtcttcakcacggtgtttaaggatgacgacgatgtggtcatcggaaaggtcttcatgcaggaattcaaagaaggackaakagccagccacacagccccccaggtcctttttagtcacagggaacctcctctagagctgaaagacacagatgctgccgtgggtgacaacattggctacatcacctttgtgctcttccctcgccataccaatgccactgctygakacaacaccatcaacctgatycacacgttccgggactatctgcactaccacattaagtgctctaaggcctatattcatacacgaatgcgagcaaaaacatctgacttccttaaggtgctcaaccgtgcacgcccagatgccgagaaaaaagaaatgaaaacaatcacggggaagacattttcatcccgctaacgcttgggaactgaggaggaagcgctgttgatggaaggctggaccgcttgctactggataa

SEQ ID NO: 3842 - DNA, 600 bp, Cricetulus griseus
aaggatgaaggcagagatggacgaacagataaaggctgttgagagagcaagcgaggaggagcgtctccgtcttcagcaggaactgagtcgggtgagacagkmgrccswcrrcrkgrkgaaaaccycasaaraacaacttgctgaacttcasaggctgcmtgccarrggagctggccascagagagcaggaactggccagaaagctccasacccgagagagggagctgcmtgascaratgaaaatagctcttgaaaaaagtcaatcagaatatttgaagctcatccaagaaaaagagcagcaagattccttggctctagaagagwtagagctgcagaaaaaagcaatcctttcagagagtgaaaataaactccaggaacttgggcgagaagcagaggtttaccgaactagaatacttgaattggaaacctccttggaaaaaagcttacaagaaagcaaaactcagtcagagcatttagctgtccatctggaagctgagaagaataagcacagtaaagagctcacagccatgactgagaagcacagggcagagctggagcgtctccagcagcagcaggacagcctgtgggctgagagactcc

SEQ ID NO: 3843 - DNA, 593 bp, Cricetulus griseus; identical to SEQ ID NO: 201

SEQ ID NO: 3844 - DNA, 232 bp, Cricetulus griseus; identical to SEQ ID NO: 202

SEQ ID NO: 3845 - DNA, 592 bp, Cricetulus griseus; identical to SEQ ID NO: 203

SEQ ID NO: 3846 - DNA, 486 bp, Cricetulus griseus; identical to SEQ ID NO: 204

SEQ ID NO: 3847 - DNA, 599 bp, Cricetulus griseus
  misc_feature (491)..(528): n is a, c, g, or t
  misc_feature (534)..(534): n is a, c, g, or t
ttggtttggggcaccatttctttgccgcggtttgtcctgtctaatgtctgtcctgtctaatgtctcsrtgtctcatatttgtggcatgcatgggtcargrktcttttcttgttgccctawkcacatggyacgggaaaggagttctgccatgtgtyacgggttakaatgtgktatgttggartcccccgaggctgcttttctgaactcgraccactgytgcagcccttacagctgakcctggcccrtrtwggtgagtctttccctatccccacttgccggtcccgtgggtccctgccatttgcctagctgcccgrcattctttgtgctctacacacatggtatgyaggggggcygyawgagtctttttcccacmcctggattggccwagggtctgggkttaccagcagcacccctaccccaggtctctctgccttgagcacayggrgswcgagcgtatgaacttatctggcytgakggttaawtgsccytannnnnnnnnnnnnnnnnnnnnnnnnnnnnnnnnnnnnnggttcncgcccccacaatttgccacctttttttttccccacttttccctatgttttccattaacacttttt

SEQ ID NO: 3848 - DNA, 558 bp, Cricetulus griseus; identical to SEQ ID NO: 206

SEQ ID NO: 3849 - DNA, 539 bp, Cricetulus griseus
  misc_feature (143)..(157): n is a, c, g, or t
ggaagaagctgactaaakaaccagccaaagccttaaattgtgcaaaacatactgttgctatgatgtaactgcatttgacctaaccactgcgaaaattcattccgctgtaacgtttttcacatatttaaagcagaagcacgtcnnnnnnnnnnnnnnntgcataaggtttttgtagtgtgatgtcttaatcatagtctaccatcaaatactttaggagtatccttaatgttkagatagaatattagcagcatgcaataattacatcctaagttctcaagcagaggcagtctattgcaaggaccttctttgctgccagttaccataggctgttttaagttagaaaactgaatagcaacactgaatactgtagagatgcactttgctcagtaatacttgagttgttgcaatatttgattatccatttggttgttacagaaaaattcttaactgtaattgatggttgttgccgtaatagtatattgcctgtatttctacctctagtaatgggctttatgtgctagattttaatatccttgagc

SEQ ID NO: 3850 - DNA, 588 bp, Cricetulus griseus
atccaccagcaagagagggcgccagtgaaaggcatcctctataagataagtcttataaaatatatagatttgtgataattaagactgagctaacagatgagaaatcctagtctttggccaagcatatttgtacctaatataagtgtctgtgtattatttggggccctaacttgtcgggcagactcgggtggctggtgtaaagcacccacgtggcagtagggctgcagtggcttttagcagaaagatttatggtaacagaatggtgtcagtgagcgggatgaccccatgccccaaggttcccagaggaagaggaaaacctgctgccacagccggcccttttgggctgctgagaggcatatgctcgcgccatcatggagttcatggaggttggactcggcactcccaagatgataaagacagatccagataaagaaaaacatctaaaggtttacactacatttaaaaatatctgtaggcttgtgagagaaaaaataacaggagaaaatagagtagttgggtgtggtggcagacacctttaatctccagactccaaakggagaggcaatcggatttccacagagaaaccct

SEQ ID NO: 3851 - DNA, 579 bp, Cricetulus griseus; identical to SEQ ID NO: 209

SEQ ID NO: 3852 - DNA, 587 bp, Cricetulus griseus
gaaaatgaacagggcaatctgagagaagttacagctgtgtatgatcgtattcttggtattccaacgcagctctacagtcatcatttccagagatttaaagaacatgtacagaataacttgcctagagatcttttaactgaggaacagttcattcaactgagaagggaattagcttctgtaaatggacacagtggtgatgatggacctcctggtgatgaccttccatcaggaattgaagacataactgatccagcaaagctaattactgaaatagaaaacatgagacacagaatcattgaaattcatcaagaaatgtttaactataatgagcatgaagktagtaagaggtggacatttgaagaaggtattaaaagaccatattttcatgtgaaaccattggaaaaggcccaactaaagaactggaaagaatacttagaattcgaaattgaaaatggaactcatgaaagagttgtggttctctttgaaagatgtgtcatatcttgtgccctctatgaggagttttggattaagtatgccaagtacatggaaaaccatagcattgaaggagtgaggcatgtcttcagcag

SEQ ID NO: 3853 - DNA, 583 bp, Cricetulus griseus; identical to SEQ ID NO: 211

SEQ ID NO: 3854 - DNA, 596 bp, Cricetulus griseus
  misc_feature (383)..(404): n is a, c, g, or t
ggcggttctcttaaagctgggagtcctctgcagtggccaaggaggccgagctctgttgctccgaagccgggtggtcaaacctgcttatgtctcagcgtttctccaggaccagcctaccccaggatggcatggcacacagcacattcacctgtcaccaagctaccattctggttccaaggctgcatctctccattggactagtgagagggctgtcagtgttttgctcttgggcctgcttccagctgggtacctgaatccctgctctgtggtggactactccctggctgctgccctcaccctgcacggtcactggggccttggacaagtggtgactgactacattcatggggatatatcgaagaargctgtcaaggcaggcctcnnnnnnnnnnnnnnnnnnnnnnttgctgggctttgctatttcaactaccacgatgtgggcatctgcagagcagttgccatgctgtggaagctctgacctctgcagtgcaacaccttggattgtatgccactttgcctctgctctgtctatgccgttcagctcccagtgagcagggcgtggagaagtcccatggtgtcagaatttcttctaatta

SEQ ID NO: 3855 - DNA, 600 bp, Cricetulus griseus
  misc_feature (73)..(90): n is a, c, g, or t
ctcgtgtccgcggtgccgttactcgcagtcgggcggcggctgaggctcagcgcagagcgcaggtagcgggttnnnnnnnnnnnnnnnnnncgcggaggcacctcggcggtcagagcccctgcgctagtgcagccaccttcgcctgctccgcgcttccttccttcgctcgcaccatggctgatcagctgactgaagaacagattgctgaattcaaggaagctttctccctattcgataaagatggtgatggcaccatcaccacaaaggaacttgggactgtcatgcggtcactgggtcagaacccaacagaagctgaattgcaggatatgatcaacgaagtggatgccgatgggaatggcaccattgacttcccagagttcttgaccatgatggctagaaaaatgaaagatacagatagcgaagaggaaatccgcgaggcattccgagtttttgacaaggatgggaatggttacatcagcgcagcagaactgcgccatgtcatgacaaacttaggagaaaaactaacagatgaagaagtagatgaaatgatcagagaagcagatattgatggagacggacaagtcaactatgaagaattcg

SEQ ID NO: 3856 - DNA, 600 bp, Cricetulus griseus; identical to SEQ ID NO: 214
  misc_feature (183)..(201): n is a, c, g, or t

SEQ ID NO: 3857 - DNA, 589 bp, Cricetulus griseus; identical to SEQ ID NO: 215

SEQ ID NO: 3858 - DNA, 600 bp, Cricetulus griseus
tcccggcgcggcttgtgagggattatccactgcgctgarttcgtcggaaccatggcgtccctttccctggcrcytgygwatatcttcaaggctggagctgatgaagagagagccgaaacagctcgcctgtcatcctttattggtgccatcgccattggagaskkggkgaagagcactttggggcccaagggcatggacaaaattcttctaagcagtggacgakatgcctctctaatggtaaccaatgatggygccaccattctaaaaaacattggtgttgacaacccakcagctaaagttttagttgatatgycaagggttcaagatgatgaagtkggtgatggcactacctctgytactgttttggcagcagaactactccgkgaagcasaatctttaattgcraaaaasatacmtccacagaccatcattkcargttggagagaakccaccmwrgcagcawgagakgcgctgktkacctcygctgttgatyacggttacgmtgamgkcaaattccggsmwkattkaatgawmattgymggaacgacwttatcctcaaaactycttaytcatcatarggaccmctttacsgarttagct

SEQ ID NO: 3859 - DNA, 600 bp, Cricetulus griseus
gctgaggaatgttcaagcagaggaaatggtagagttttcttcaggcttaaagggtatgtccctgaacttggaacctgacaatgttggagttgtcgtgttcggaaatgataaactgattaaagaaggcgacattgtgaagagaacgggtgccattgtggacgttccagttggcgaggagctgttgggccgtgtagttgatgcccttggtaatgccattgatgggaagggtccaattggttccaagacccgtagacgagtgggcctgaaagcccctggaatcattccccgaatctcagtgcgggaaccaatgcagactggcattaaggctgtggatagcctggtgccaattggtcgtggtcagcgtgagctgattattggtgacagacagactgggaaaacatcgattgctattgacacaatcatcaaccagaaacgtttcaatgatgggactgacgaaaagaagaagctgtactgtatctacgttgctattggtcagaaacggtccactgtcgcccagttggtgaagagactgacagatgcagatgccatgaagtacaccattgtggtgtcagctacggcttctgatgctgccccacttca

SEQ ID NO: 3860 - DNA, 389 bp, Cricetulus griseus; identical to SEQ ID NO: 218

SEQ ID NO: 3861 - DNA, 700 bp, Cricetulus griseus; identical to SEQ ID NO: 219

SEQ ID NO: 3862 - DNA, 586 bp, Cricetulus griseus; identical to SEQ ID NO: 220

SEQ ID NO: 3863 - DNA, 591 bp, Cricetulus griseus; identical to SEQ ID NO: 221

SEQ ID NO: 3864 - DNA, 600 bp, Cricetulus griseus
caggactgctgagctacctggtgttcaacatcatccccaccctggctgacatcattattggcatcatctacttcagcatgttcttcaatgcctggtttggcctcattgtgttcctgtgcatgagtctttacctcatcctgactattgtggtcacggasyggagakccaastttcsccgygatatgawcacacagtgaaaatgtcaccaakgcacgagcagtggactcgctgctcaactttgakacggtgaaatactacaatgctgagggttatgaagtagaccgctacagagaggccatcgtcaagtatcagggtttggagtggaagtcaaatgcttcactggttgtattgaatcagacccagaacttggtgattgggcttgggctcctggctggctccttactttgtgcatacttcgtcagtgagcagaagctgcaggttggggactttgtgctttttggcacttacatcactcaactgtacatgcctctcaactggtttggcacctactacaggatgatccagactaatttcattgacatggagaacatgtttgacttgctgaaagaggaaacggaagtaaaggatgttcctggagca

SEQ ID NO: 3865 - DNA, 555 bp, Cricetulus griseus; identical to SEQ ID NO: 223

SEQ ID NO: 3866 - DNA, 567 bp, Cricetulus griseus; identical to SEQ ID NO: 224

SEQ ID NO: 3867 - DNA, 600 bp, Cricetulus griseus
ggtaccttcttcatggtttggaatgtgtggtagcaatgcatcaagctcagctgatctccaagataccacatattttgaaggagatgtatgatgcagatcttttagaagaagaggtcatcatcagctggtcagaaaaggcctctaagaaatatgtctcaaaagaacttgccaaagagattcgcgtcaaagcagaaccatttattaaatggttgaaggaagcagaggaagaatcttctggkggtgaggaagaaatgaagatgaaaatattgaggtggtatattcgaagactgccagtgtaccaaaagttgaaactgtgaagtctgacaacaaggatgacgacattgatattgatgccatttaaaggatggatgcaacttagcttaacagtataatgctgcaaatttttctccattatcagccagaagtgcaacatgtatgtgcaaaagctaaaatggcttaacatcatgctacacttgatactaaaaagctattactgtgagtggtctataattaagcccaatgagacatctagggagtccatacatatcagtgagcagttgtagtttgcttatttatagcatgtttcttttggaaaaacta

SEQ ID NO: 3868 - DNA, 600 bp, Cricetulus griseus
tgttagtgactggaaggagcatacaaagtataaaaatggctacagcgtaaaccaccaggtcatccattggttctggaaggctgttttaatgatggatgcagaaaaaagaatacgcttgcttcaatttgttaccggcacatcccgtgtgcctatgaatggatttgctgaactctatggctcgaatggaccacagtccttcacagttgaacagtggggcacccctgataagctgccaagagcacatacctgctttaatcgcctggacctgccaccctacgaatcgtttgacgaactctgggataaacttcagatggcgattgaaaacactcagggctttgatggggtcgattagattacaagtaacaagctgtggtgtcttaaacaccatagtttttaagcaaaagcaaaattgcatcttaacattttccagagtacttctataagatagtcactggctcttccccgagagaccagagtacacagttcatccaaggtttcagccaccaccatactgaagtgttcatttgtccagttactttgtcctttcattggggttcacacgacagggcatttaagtcctgtgtgcctggctgtatctca

SEQ ID NO: 3869 - DNA, 600 bp, Cricetulus griseus
ataggaaaggggatagaagagacagggatcgggaaagagagaaagagaacgagaggggtcgaagacgagatagagattatgataaagaaagaggcagtgatcgagaaagggacagggagagatcaagagagcggtccaaggagcagcgaagtagaggtgagggagaggaaaaaaagcacaaagaagacaaggaggataggcgacacagagacgacaaaaaagaattcaagaaaaaacacagcagaagtagaagcagagaaaggaaacacagaagtagaagcagaagcaaaaatgcagggaagcggagcaggagcaggagcaaagacaagtcaagcaaacataaaaatgaaagcaaagaaaagtcaaacaaaagaagtagaagtggcagtcaaggaagaactggcagtgttgaaaaattgaggaaacgagaacacagccctagcaaagagaagtctagaaagcgcagcagaagccaagaccgctcccacaagagagatcatggggatggcaaggaccagtcagacagacaggatcatcagagaagccagagtgtagagccagagagccaagaaaaagaacataaaaacaaagatgagacta

SEQ ID NO: 3870 - DNA, 600 bp, Cricetulus griseus
  misc_feature (409)..(450): n is a, c, g, or t
attcaggaggatgtgcttaggcttctgacactgtgtgtcagaacggcactatttcagtttatagccctctcatacatagtacagtagttgattaaaaaacaaaaccagtaaaatggcatttgcctcacagttattaactatcaatctggctagatcttcatgcagtaacctaaatgtgatatattgggtgtgagagaactgtgttggggtttttagattttcgacactagtttgcctctttaattttcacaacccyttattagcaagttccttttatatataggccctaaaattgggatagttaaaatatggttgttaattatgattagcctttggtgaaaataggtttaaagtctgttttgattccaatgtttctcccaaagaattctgtgttaaatatacaccaagnnnnnnnnnnnnnnnnnnnnnnnnnnnnnnnnnnnnnnnnnncctggaaataggagtaagtttgtatgttattgtkgatagagcaactcaggtaatttccatttctggttttctattctctgkgtaractacctgggkgtcactttctarccagcaaggggcttcactgctgtctagatgtctttcataatg

SEQ ID NO: 3871 - DNA, 592 bp, Cricetulus griseus; identical to SEQ ID NO: 229

SEQ ID NO: 3872 - DNA, 600 bp, Cricetulus griseus
cagctgtgtgaggacaaccacgaggaagactattttctgtatgtggcctacagtgacgaaagtgtctatgggaaatgaggcagaagcccagcagatgggagcacctggacttgggggtaggggtggggtgcttgtgggactcggggaaccagatggagggctcccaaccatggaggagacgcaaggtgaagaacatcggaaaacatcacaccgcacacactgtcttctgttttttcacaagctcaatcgttagttttctctgcttcctcagcccasgaagatcttgtgttggcttgactgtgagagcagggtgggtactttgttactcacagctttgctctgaattttcctgcagtttcatcagacggttgggaggagggcaggtggccactcgagaggaatacagttcagcagcaactcctgtctctttgggcagaggtttaatttttggcatttgcacaaaatgccaaaatttgcacatagggaaagggggaaaatgctttaggagctgtaggggaccatacctaagggaccaaaaaattcccactgtcattgaagcattgtgacccctgacctctgtctccaattcctccctctcca

SEQ ID NO: 3873 - DNA, 584 bp, Cricetulus griseus; identical to SEQ ID NO: 231

SEQ ID NO: 3874 - DNA, 600 bp, Cricetulus griseus
catggawtgacatcaaaaaggtctatgcctctcagagaatgagagcgggcaaaggcaaaatgagaaaccgaagacggatccagcgcaggggaccctgcatcatctatmatgaggataatggtatcatcawrgycttcagraacatccctggtattactctgctcaatgtgagcaaactgaacattttgaaacttgctcctggtggacatgtgggacgtttctgcatctggaccgagggtgccttccgaaagttagatgarttgtatgggacttggcgtaaggctgcttccctgaaaagtaattacaaccttcccatgcacaagatgatgaacacmgacctaagcaggatcctaaaaagcccakagatccaaagagccctccgagcaccacgcaagaagattcatcgtagagtcttgaaaaagaacccactgaaaaacctgagaataatgttgaagctcaacccgtatgcaaagactatgaggaggaataccattcttcgccaggccagaaatcacaaactgcgggtgaagaaactagaagcagcagcagcagcgctagcagcaaaatcagagaaaggggcagcagatcagaagtcagtag

SEQ ID NO: 3875 - DNA, 579 bp, Cricetulus griseus; identical to SEQ ID NO: 233

SEQ ID NO: 3876 - DNA, 580 bp, Cricetulus griseus; identical to SEQ ID NO: 234
  misc_feature (496)..(540): n is a, c, g, or t

SEQ ID NO: 3877 - DNA, 574 bp, Cricetulus griseus; identical to SEQ ID NO: 235

SEQ ID NO: 3878 - DNA, 600 bp, Cricetulus griseus
caactacacagaattattggattgacatccacttackatggggagactatgatycccatgatatcgagcgctatgcccgggccaagttcctgggattataccacagacaacatgagtrkskacccttctcccacakgtgtgctcattgccattgacctggcctatwatctacacagtgcctatggaaactggtttccasgcagmaagcctcttatacagcaggctatggccaaratcatgaaggcaaatcctgccttgtatgtattacgygaacggatscgcwaaggactgcagttgtattcatctgagcccactgagccttatctgtcctctcagaactatggtgaactcttctctaaccagattatctggtttgtggatgacaccaatgtctatagagtgaccatccacaagacctttgaggggaacttgacaaccaaacccatcaacggagccatcttcatctttaacccacgtacggggcagcttttcctcaagataatccatacatctgtgtgggctggacagaagcgtttgggtcagttggccaagtggaagacagctgaggaagtggctgccctgattcgatctctgcctgta

SEQ ID NO: 3879 - DNA, 557 bp, Cricetulus griseus; identical to SEQ ID NO: 237

SEQ ID NO: 3880 - DNA, 503 bp, Cricetulus griseus; identical to SEQ ID NO: 238
  misc_feature (69)..(90): n is a, c, g, or t
  misc_feature (381)..(393): n is a, c, g, or t
  misc_feature (395)..(417): n is a, c, g, or t
  misc_feature (429)..(458): n is a, c, g, or t

SEQ ID NO: 3881 - DNA, 536 bp, Cricetulus griseus; identical to SEQ ID NO: 239
  misc_feature (121)..(184): n is a, c, g, or t
  misc_feature (420)..(494): n is a, c, g, or t

SEQ ID NO: 3882 - DNA, 600 bp, Cricetulus griseus
gggtgtgccgaagaatagcaactggatcttttctcaaaaggaaccctggtgtaaaggaagggtataaattttacccaccaaaagtagagatgttcttcaaggatgatgccaataatgacccgcagtggtctgaggagcagctcattgctgcaaagttctgctttgctggacttgttataggccagactgaagttgacatcatgagtcatgctacccaagctatatttgaaatcctggagaagtcctggcttccccagaactgtacactggttgatatgaagattgaatttggtgttgatgtaaccaccaaagagattgttctggctgatgttattgataatgattcctggagactctggccatcaggggatcggagccagcagaaagacaaacagtcttaccgtgacctcaaggaagtaactccggaaggactgcagatggtaaagaagaactttgagtgggttgcagatcgagtggagttactcctgaagtcagatagtcagtgcagggttgtagtgctgatgggttccacttctgaccttggtcactgtgagaaaattaaaaaggcttgtggaaacttcgggattccatgtgaacttc

SEQ ID NO: 3883 - DNA, 551 bp, Cricetulus griseus; identical to SEQ ID NO: 241

SEQ ID NO: 3884 - DNA, 584 bp, Cricetulus griseus; identical to SEQ ID NO: 242
  misc_feature (512)..(512): n is a, c, g, or t

SEQ ID NO: 3885 - DNA, 570 bp, Cricetulus griseus; identical to SEQ ID NO: 243
  misc_feature (51)..(70): n is a, c, g, or t

SEQ ID NO: 3886 - DNA, 356 bp, Cricetulus griseus; identical to SEQ ID NO: 244
  misc_feature (298)..(298): n is a, c, g, or t

SEQ ID NO: 3887 - DNA, 600 bp, Cricetulus griseus
gaagatggttccaataagaaggagacacagacggattctgtttctaggtatgacagcagttccacgtcatcaagtgatcggtatgattccttgctgggtcgctctggttcatatagttacttagaagaaagaaaaccttatagtagcaggctagaaaaggatgatksaactgacttcaaaaagctttatgaacaaattttagccgaaaatgaaaagctaaaggcacagctacatgatacaaatatggaactaacggatctaaagttgcagttggaaaaggctacccagagacaagaaagatttgctgataggtcactgttagagatggaaaagagggaacgaagagctctagaaagaagaatatctgaaatggaagaagagctcaaaatgttgccagacttaaaagcagacaaccagaggctaaaggatgaaaatggggccttgatcagagtcataagcaaactttccaaataggacggagaagagaaacaagcaaagcagcaggacttgcacatactccgcagtggaccacattggcagccactggacacccgaaagaacctttggagactcatttcccgatatcctgccaaatgccct

SEQ ID NO: 3888 - DNA, 580 bp, Cricetulus griseus; identical to SEQ ID NO: 246

SEQ ID NO: 3889 - DNA, 282 bp, Cricetulus griseus; identical to SEQ ID NO: 247

SEQ ID NO: 3890 - DNA, 600 bp, Cricetulus griseus
cctggggcccgtggactgggaacgggaccttctggctgccagctgtgaaaccgtttcargagggtgtctacctggctactgtgcacctgccctatctgcaaggacaggtctccctgcagctgactgtgcacaagtcccccaaagtgtctctgacaccagcaccccttgtgtgggctgccccargagaggcacccccggagctgctctgcctcgtgtcccatttctaccctgcggaaggcctggaggtggagtgggagctcagaggtggtccagaaggcggttccagawaggctgagggggggacgtggctctccaccgtccgccaccattctgatggctctgtcagccaggccgggcacctgcggctccccccagtcactgcccagcagcatggagtccgctatgcctgtcgggtccaccaccccagcctgcccgcatcgggtcgcagtgctgaagtcaccctggaagtggcaggcctctctgggccttcagtcgaggacagcataagcctgttcctgtccgctttcctcctcctgggactcatcaaggcactgggctggatggctgcctacgtgaccttccgtgaagactcaaaggtga

SEQ ID NO: 3891 - DNA, 536 bp, Cricetulus griseus; identical to SEQ ID NO: 249
  misc_feature (226)..(240): n is a, c, g, or t

SEQ ID NO: 3892 - DNA, 581 bp, Cricetulus griseus; identical to SEQ ID NO: 250

SEQ ID NO: 3893 - DNA, 580 bp, Cricetulus griseus; identical to SEQ ID NO: 251

SEQ ID NO: 3894 - DNA, 379 bp, Cricetulus griseus; identical to SEQ ID NO: 252

SEQ ID NO: 3895 - DNA, 524 bp, Cricetulus griseus; identical to SEQ ID NO: 253
  misc_feature (210)..(222): n is a, c, g, or t
  misc_feature (224)..(237): n is a, c, g, or t

SEQ ID NO: 3896 - DNA, 579 bp, Cricetulus griseus; identical to SEQ ID NO: 254

SEQ ID NO: 3897 - DNA, 433 bp, Cricetulus griseus; identical to SEQ ID NO: 255
  misc_feature (186)..(208): n is a, c, g, or t

SEQ ID NO: 3898 - DNA, 580 bp, Cricetulus griseus
caccattgaaattctaagtgatgtgcagctgataaaaactggagacaaagtaggagccagtgaagccacactgctgaacatgctcaacatctcccccttctcctttgggctgatcatccagcaggtgtttgacaatggcagcatttacaacccagaagtgcttgacatcacagagcagactttgcactcacgcttcctagagggtgtccgaaatgttgccagtgtttgtctgcagattggttacccgactgttgcctcagtgccacactctatcatcaatggttacaagcgggtcctggctttgtctgtggagactgattacaccttcccacttgctgaaaaggtcaaggccttcttggctgatccatctgcatttgcggctgctgctcctgtggctgctgccaccactgctgctcctgctgccgctgcagccccagcgaaggctgaagccaaggaagagtcggaggaatcagatgaggatatgggatttggtctgtttgactgatccctcagagcaacctactcagccagtttaatttgagaaatatggaaataaagaataaagtcttacttctgttgt

SEQ ID NO: 3899 - DNA, 589 bp, Cricetulus griseus
gaaggacaagttgtctgttttgatgccaagataaactttgatgacaatgctgagttccgacaaaaggacatatttgctatggacgacaaatsagagaatgagcccattgaaaatgaagctgycargtaccatcttaagtacatcggactagacrggaacattgyctgcttcgkkaatggcgctggattagccmtggctrcttrtsacataattktsctgaatggagggaagccagctaacttyytkraccytggargtggkgtaaaggaagcccaagtctatcaagcattcaaactgatcacatctgatcccaaggtggaagccatcctcgtcaatatatttggtgggattgtcaactgtgccatcattgccaatgggatcaccaaagcctgccgggagttagaactcaaggtgccactagtagtccggcttgaaggaactaatgtccaagaggctcagaaaatcctcagaaacagtggcctccctatcacatcagctgcggacctggaggatgctgccaagatagctgttgccagtgtggcaaagaagtgatgtgatggcttcccccggctcccgtgaagataggcac

SEQ ID NO: 3900 - DNA, 688 bp, Cricetulus griseus; identical to SEQ ID NO: 258

SEQ ID NO: 3901 - DNA, 600 bp, Cricetulus griseus
gtcaatggcaaggtgaagggaaggatcttcgtggggaacagccaggtgcccgtggtgtttgagaacactgacctacactcctatgtggtgatgaaccatggacgctcttacacagccatcagcaccattcctgaaactgttgggtattctctgcttcccctggsrcccattggaggcatcattggatggatgtttgcagtggagcakaaygggttcaagaatgggtttagcatcactgggggcgagttyayccgacaagccgaggtgaccttcttggggcacccggkcaakctggycctgaagyarcactycaktggtattgackaacacggacacctgaccatcaacacagaactagacggccgagtgccacagatcccctatggttcttcagtgcacattgagccctacacagagctgtatcactactccagctcagtgatcacttcctcctccaccctggagtacacggtgactgatcctgatccggacggcactgcaccctcacacacccatgtttaccagtggcgtgagaccattacctttcaagagtgtgtccatgatgacttcatgccatccctgcccattacccatcatctc

SEQ ID NO: 3902 - DNA, 586 bp, Cricetulus griseus; identical to SEQ ID NO: 260

SEQ ID NO: 3903 - DNA, 587 bp, Cricetulus griseus; identical to SEQ ID NO: 261

SEQ ID NO: 3904 - DNA, 579 bp, Cricetulus griseus; identical to SEQ ID NO: 262
  misc_feature (455)..(472): n is a, c, g, or t

SEQ ID NO: 3905 - DNA, 579 bp, Cricetulus griseus; identical to SEQ ID NO: 263

SEQ ID NO: 3906 - DNA, 600 bp, Cricetulus griseus
tttaaggaggaagaaacagccactgtgcctcatggattctatgctctcccrsrggcattgtggggtgatgctccctgggtgccaagccctattctargtactgtgaacagcmaakagctggctwggggtgggggataccttgctggctgagytgccacagtgycatatrctsccakgccakcatscasgctggkcacatwwcwtaccwvasytkgccttstggggctaggtttctgttcacaggacagtcctcttcattggtgccccakatgccttgtatcttgcactttaaacaaagggagcatctctgtgccaaagaccaaaggcctcactcaccctgtgcctcatgaccacaagtcaggcaagactggaattgtgccacttgcatccaccccttcaggcaggaaaacctgcttgaaggcttggcccaagagtcaagacaaaaggatgagactccaaagaagccaacatccacctcaaggaatgaggggtcaagtcccttcaccctggtggcctctaattggagctccacagttggagaggaaaagaccagatatggatgggcctaatgccatacagaaaatctcaagccctgttatg

SEQ ID NO: 3907 - DNA, 600 bp, Cricetulus griseus
agcgtcctacctaaggtacgctgggagacgctgygatggcsagktcrgcagccgcagcctccttccttgctccgactctggagcarctccggcacctgscagcggasctgcggtcacttctgcctctagtgarggwcrgcgaagcccaggakacakccgaggaatttaatcgagagaygttctggagaagacttaatgaggcagcagkgaacctgtcaggggaagccackattctgaccacacttttckcccgacttccactgccgtctccacrggaaacccakaggatctgtgagcaaatkcatgttggcatcaarsaaattattgamstatatyattcacttcctaaaaatcasgggatcaccctgagaaagctggtgcggaatgctactwtggacgttgtggatggcatggctcatctyctggwagtgcttatctctccatctyakagcactgagaactgygaccttattycckgcwatagtgtctcggtagcatgccaaaaggtgtctgagattccaaaagataacaaggctgcagcccttatgatgctgacaaagtgtgtgaatcctgtgaaagatgcacatgaagaaatggagc

SEQ ID NO: 3908 - DNA, 579 bp, Cricetulus griseus; identical to SEQ ID NO: 266
  misc_feature (327)..(327): n is a, c, g, or t

SEQ ID NO: 3909 - DNA, 600 bp, Cricetulus griseus
cctctgagttcttcargtctggcaaatatgacctagacttcaagtctccggatgaccccagcaggcacatcacacctgaccagctggctgacctgtataagtccttcatccaggagtatccagtggtgtccatcgaggacccctttgaccasgacgactgkgaggcctggaaraatttcacakctagtgcakgcatccasgtggttggggatgatctcacagtaaccaaccctaasakgattgccaaggctgtcagtgagaaktcctgcaactgcctcctgctcaaagtcrrccagattggctctgtgaccgagtctctgcaggcgtgtaakctggctcagtccaatggctggggtgtcatggtgtcccatckctccggggagacagaggacactttcattgccgacctggtggtarggctctgcactgggcagatcaagactggtgccccttgccgatctgagcgtctggccaactacaatcagatccttataatcaaggaagagctgcgcatcaaggccaagtttgctggcataagcttcaggaaccccctggccaactaaagtgtgtggagatcctgaaaacacctgccgcttagcc

SEQ ID NO: 3910 - DNA, 600 bp, Cricetulus griseus
  misc_feature (511)..(533): n is a, c, g, or t
cttattagagagggcatcacagggctgtatcggggcatggctgcacccatcattggagtcacccctatgttcgctgtgtgcttctttgggtttggtttggggaagaaactacagcagaaatctccagaggatacacttaactacccacagctgtttgcagctggaatgtkrkskggtgtgttcaccacgggaatcatgacccctggagaacggattaaatgcttgctgcagattcaggcttctacgggggaaaccaaatacactggtaccttggactgtgcaaagaagctctatcaggagtttgggatccgtggcttctacaaagggactgtgctgaccctcatgcgagatgttccagccagtgggatgtatttcatgacatatgaatggcttaaaaatctcttcactccagagggaaagagtgtcagtgacctcagtgtaccccggatcctcgtggctggaggctttgccgggatcttcaactgggctgtcgcaatccccccagatgtgnnnnnnnnnnnnnnnnnnnnnnnccctcctgggaaatatccccatgggttcagaaacgtgctgagagagctgatccgggatgaaggagtg

SEQ ID NO: 3911 - DNA, 600 bp, Cricetulus griseus
caagggggcaaaggaccgawggacaaattccagaagccaaatacattcaacawgaagaggaagttccagccagatggtaaaagcgacgaatcakcagccmagaaacccawatgggatgacttcgaaaagaataataaagagctgaagcagagcaggcagctcagtgataagaccaactatgacatcgtggttcgagcaaagcacatttgggaragcttgagaagaaaagactgygrtmaagaaaawagaaggaagctgatgagtgatttgcagaaattgattcmasggaaaattaaaactattgctttcgcacatgactcgacacgtgtgatccagtgcttcattcagtatggaaatgaagagcagaggaagcaggcttttgaagaactacaaggtgacttggttgaactaagtaaagccaaatattccaggaatattgtcaagaaatttctcatgtatggaagtaaaccacagatagcagagataatcagaagttttaaaggtcacgtgaggaagatgctgcgacattcagaggcatcagccatcgtggagtatgcgtacaatgacaaagccattttggaacagaggaacatgctgacc

SEQ ID NO: 3912 - DNA, 600 bp, Cricetulus griseus
  misc_feature (530)..(564): n is a, c, g, or t
ttctaccgccagctgctgctgactgctgatgaccgtgtgaatccctgcattgggggggtgatccttttccatgaaacactgtaccakaaggccgatgatggacgtcccttcccccaagttatcaagtccaarggcggkgttgtgggcattaargtagataaaggcgtggtgcctctggcaggaaccaatggtgagaccaccactcaargactggatgggctgtctgaacgatgtgcccagtacaagaaggatggagctgactttgccaagtggcgttgtgtgctaaagattggggaacatactccctcagcccttgccatcatggaaaatgccaatgttctggcccgttatgccagcatctgccagcagaatggcattgtacccattgtggagcccgaaatcctscctgatggggaccatgacttaaagcgctgtcagtatgtaactgagaaggtactggctgctgtctacaaagctctgagtgaccaccatgtctatctggaaggcacactgttgaagcccaacatggnnnnnnnnnnnnnnnnnnnnnnnnnnnnnnnnnnnaatgaggagattgccatggcaactgtcacagcactt

SEQ ID NO: 3913 - DNA, 508 bp, Cricetulus griseus; identical to SEQ ID NO: 271

SEQ ID NO: 3914 - DNA, 600 bp, Cricetulus griseus
tcattctgaggcgcttgaagaacttttgtacaccatgggtgtaggaggcatcctacagctccaagccagcattgcaactgtaagacccctggaaagctcargcttccaggatcttagcccaggactgaagccaccccaatcaccaggctgagttgaaagcttgatgcaaactgcatgaggctttattgttgtttaacgagctaaccctatgttatctcgggtctttcacccacccgccatggcagatagctagcaaagatagttcgaagcgtctgcatagagatcttgtagggcagagtaaggggagtgtctaggggtacgcacaggctcaggattggtgtgcctccaggcttggagggcttgccctgtgttgattggccaactggttgttatggcccataggccctcgcagggtggttgctatgctctgcacatcattgctgtgcacttgtccgtaaagcacacccagagccgtaaagcataccaccaccagctaacttctgattggttccttgcaggaggcacgcatctgaccttagtgactaaggtcagataatcatgtgttcagctgttatggctgccgaaatggggagctggtcg

SEQ ID NO: 3915 - DNA, 580 bp, Cricetulus griseus; identical to SEQ ID NO: 273

SEQ ID NO: 3916 - DNA, 574 bp, Cricetulus griseus; identical to SEQ ID NO: 274

SEQ ID NO: 3917 - DNA, 534 bp, Cricetulus griseus; identical to SEQ ID NO: 275
  misc_feature (296)..(313): n is a, c, g, or t

SEQ ID NO: 3918 - DNA, 536 bp, Cricetulus griseus; identical to SEQ ID NO: 276
  misc_feature (363)..(379): n is a, c, g, or t

SEQ ID NO: 3919 - DNA, 578 bp, Cricetulus griseus; identical to SEQ ID NO: 277
  misc_feature (226)..(283): n is a, c, g, or t

SEQ ID NO: 3920 - DNA, 600 bp, Cricetulus griseus
tctgcttgtctgatcacccagkatgccgcgtggaagccgaagccgctcttcccgggtggcccctccggccagccgggcccctcagatgagggctgctcctagacatgcacctgcagctcagcctccagcagcagctgcaccatctgcagttggctcccctgctgstgcacccaggcagccaggcctgatggcccagatggcaaccactgcarctggtgtggctgtgggctctgcggtgggtcacaccctgggtcatgccatcactgggggcttcaktgggggtggcagtgctgagcctgcaagacctgacatcacttaccaggagccccagggaacccagctgctggaccagcagcgagggccatgctctcttgagatcaaacagtttctggaatgtgcccagaaccagartgacstcargctttgcgarggtttcawtgargwgttgcgacagkgcavaattgcmaatggkttaatctaatcmagaakytcaaactgaasaaakgggctctgcctmattgatagkgaaagtgkggaccctgagkaaacaaatcttatytctwatarctsctttacttcagccatggagagartsctaac

SEQ ID NO: 3921 - DNA, 282 bp, Cricetulus griseus; identical to SEQ ID NO: 279
  misc_feature (191)..(192): n is a, c, g, or t

SEQ ID NO: 3922 - DNA, 600 bp, Cricetulus griseus
actggattgtcacacagctcacatagcatgcaagtttgctgagcttaargagaagattgatcgccgttctggtaagaagctggaagatggcsctaaattcttgaaatctggtgatgcagccatcgttgatatggttcctggcaagcccatgtgtgttgagagcttctctgactatcctccactgggtcgttttgctgttcgtgacatgaggcagacagttgctgtgggtgtcatcaaagctgtggacaaraargctgctggagcgggcaaagtcaccaagtckgcccakaaagctcagaargctaaatgaatattacccctaacacctgccaccccagtcttaatcagtggtggaagaacggtctcagaactgtttgtctcaattggccatttaagtttaatagtgaaagactggttaatgataacaatgcatcggaaaaccttcaggaggaaaggagaatgttttgtggaacatttttgtgtgtgtggcagttttaagttattagttttcaaaatcagtactttttaatggaaacaacttgaccaaaaatctgtcaakwwttttgagacccattaaaatacaagtttaatgagaaaaaa

SEQ ID NO: 3923 - DNA, 600 bp, Cricetulus griseus
cttccagactgaagccgtctgtacagagcctcaattcagttcctgggaagacaagaaaataaaaagayacttctttaaaaatggcgatggtatcakaattcctcaagcaggcctggtttattgacaaccaagaacaggaatrtgtkcaagctgtaaaatcatccaaaggtggtcctgggtctgccgtgagtccctacccatccttcaatccatcctcagatgttgctgccttacacaaagctatcatggttaaaggtgtggatgaagcaaccattattgacattcttaccaagagaaccaatgctcagcgccagcagatcaaggcagcatacttgcaggaaactggaaagcccctggatraaatgctgagaaaagcccttacaggccatctggaagaggttgttttggctctgctaaaaactccagcccagtttgatgcasatgaactccgtgcggccatgaaggggcttggaacagatgaagacactctcattgagattttggtatcaagaaataacagagawatcagagaaatcaacagartctacagagaagagctaaagagagatctggccaaagacatcacttcggatacttctg

SEQ ID NO: 3924 - DNA, 600 bp, Cricetulus griseus
  misc_feature (27)..(51): n is a, c, g, or t
  misc_feature (85)..(133): n is a, c, g, or t
  misc_feature (165)..(212): n is a, c, g, or t
  misc_feature (251)..(293): n is a, c, g, or t
  misc_feature (481)..(504): n is a, c, g, or t
tctgctcgcgtcaccgccgggatgaannnnnnnnnnnnnnnnnnnnnnnnngcggtccatcacgcagatcaagtacaaccgcgannnnnnnnnnnnnnnnnnnnnnnnnnnnnnnnnnnnnnnnnnnnnnnnntactctgtgaatggcgagaggctgggcacctnnnnnnnnnnnnnnnnnnnnnnnnnnnnnnnnnnnnnnnnnnnnnnnnaccaagcatgtccttactggctcagctgataacagctgnnnnnnnnnnnnnnnnnnnnnnnnnnnnnnnnnnnnnnnnnnngaagaccaactcagccgtccgaacctgtggctttgacttcgggggtaacatcatcatgctctccacagacaagcagatggggtaccagtgttctgtgagcttcttcgatctacgggatccaagccagattgacaccaatgagccctacatgaagatcccctgcaatgactccaagatcaccaktgccnnnnnnnnnnnnnnnnnnnnnnnnattattgcaggacatgagagtggtgagctcaaccagtatagcgccaagtctggggaggtgttkgtgagcgttaargaacactcccsgcagatcaat

SEQ ID NO: 3925 - DNA, 600 bp, Cricetulus griseus
gctgacatctgagtatcakttgctaactacaggctgkyctaagtrgactgcgakccctggacttgctgtggatgtgaaccaktccagctgatrtggacaccccctgtctctgcaacagtgtstgctaaccadaagcccctgatraattccccattgsctarattcctttttgcttttgactagcatttcaaccttctggggtccctaacttcgtcccaaagtcagcasgaagcagtytggaaaagaatttcrcygtccattttccctggttraaatgctaagtcaaaakgaactcccttgcatggggatgacagtatctatcactccctgatggggatgctagagagacagcamttccatgattggaatttacaaaaaasaaaatgggggaatgaasgaaccggcttcccttttggcagmcataayagccsaacatgtgcttgscatatacctgccttggtcacttakaggtcakatgccygtcttgtgacaaggaaccaatcagaagttagctggtggcgctatgctttacgaccctgggtgtgctttacggacaagcgcacagcaatgacgtagagagcatagcaaccaccctgggag

SEQ ID NO: 3926 - DNA, 600 bp, Cricetulus griseus
ttgagacggtgaggccacttytctactacctycctctytggtgtggcctctcggccaaagctcccatccacagctgggatgtctgagccacakyctgctgcactgttwycgctctgggatcttctgagttacttttttaggctgtggtttggygamargawccmacacattaacgatyytttttttccccaaaagcchctgwawaattcttggcatgttttsatgkccctgttggctgcctggtttgggagcagttgtggaraadaggacagtmccacacagagtgtggaattttgggagctgcttgkggcctgcctgtttctggcatgtaccctgggcgtgtgctgwacctgctgggccagctgcgcacgtttctaccctgtccctggagcahcascgtgagcascatgagtgkctctggaagyttaaagtggagtgttctakgaagtgtccctgacavaattccctgttctctatgaccccatttgggctctcagcccctytakcaactttatgccccggycctatctttgctcccgtcctctcygtctgctagtccttgaagcctttaaccaaatgggagtgggtgcagaaagcctt

SEQ ID NO: 3927 - DNA, 584 bp, Cricetulus griseus; identical to SEQ ID NO: 285

SEQ ID NO: 3928 - DNA, 560 bp, Cricetulus griseus
ggtggcgcgcggcggcaagatggcggtgcagatttccaagaagaggaagtttgtggctgatggcatcttcaaagcagagctgaatgagtttctcactcgggaactggctgaagacggctactcgggagttgaagtccgagttacaccaaccagaacagaaatcattattttagccaccagaacacaaaatgttcttggtgagaagggtcgtcgaatcagagagttgactgcggtagttcaraagaggttcggcttccctgagggcagcgtagagctttatgcagaaaaggtggccacaagaggtctgtgtgccattgctcaggcagagtctctacgttacaaactcctargaggacttgctgtgcgaagggcctgctatggtgtgcttcggttcattatggagagtggggccaagggctgtgaggttgtggtgtctgggaagctccgaggacagagagccaagtccatgaagtttgtggatgggctgatgatccacagtggagaccctgttaactactatgttgatactgcggtacgccatgtactcctcagacagggtg

SEQ ID NO: 3929 - DNA, 1051 bp, Cricetulus griseus; identical to SEQ ID NO: 287

SEQ ID NO: 3930 - DNA, 600 bp, Cricetulus griseus
  misc_feature (27)..(45): n is a, c, g, or t
acaactggggaactgtcaaagatgaannnnnnnnnnnnnnnnnnncaaatgtgaccgaggaaacacctgaaggtgaagagcacccagtggcagacactgaaaataaggagaatgaagttgaagaggttaaggaagagggtccaaaagagatgactttggatgagtggaaagctattcaaaataaagaccgagcaaaagtagagtttaatatccgaaaaccaaatgaaggtgctgatggacaatggaaaaagggatttgttctgcataaatcaaaaagcgaagaggctcatgctgaagattcggttatggaccatcatttccggaagccagcaaatgatwtaacgtctcaactagagatcaattttggagacctaggccgcccaggacgtggtggcagaggaggacgtggtggacgtggacgtggtggacgtccaaaccgtggcagcagaactgataagtcaagtgcttctgctcctgatgtagatgacccagaggcattcccagctctggcctaactggatgccataatacaacactggttcctttgtggaccctcctgttcaaagcttttgcatgcttaaggatcccaaacaactaaga

SEQ ID NO: 3931 - DNA, 578 bp, Cricetulus griseus; identical to SEQ ID NO: 289

SEQ ID NO: 3932 - DNA, 600 bp, Cricetulus griseus
attccacaatacaaaacaggtgacaagaggttttgctggtggtgttcaracagtaactttaattccaggagatggaattggcccagaaatctccgcctcagttatgaagatttttgatgctgccaaagcccctattcaatgggaggagcgtaatgtcactgccattcaaggaccaggaggaaagtggatgatccctccagaagccaaagagtccatggataagaacaagatgggcttgaaaggcccactaaagaccccaatagcagctggccatccatctatgaatctgttgctccgtaagacatttgacctttatgccaatgtccggccatgtgtctcaattgaaggttataaaaccccttacacggatgtaaatattgtcaccatccgagagaacacggaaggagaatrcagtggaattgagcatgtgatcgytgatggagttgtgcakakcatcaagctcatcaccsaacaagcgagcaakcgcattgctgaktttgccttcsagtacgctaggaacaaccaccggakcaacgtcacagcggwgcacaaagccaacatcatgcggtatgtcagatgggctttttctgcataaaatgc

SEQ ID NO: 3933 - DNA, 599 bp, Cricetulus griseus
  misc_feature (474)..(493): n is a, c, g, or t
gcytctgcgttctggtagtggcgctgcttgggccggtggctgaastgagagctgctggtgtcgcgattgaggagaactgcgagtgtgttcagcctgtccccttcgggatcccakccacgatgagtgctgcccgggagtytcacccayackgggtgaagcgttcagcctcccccgacgacgatcttggatctagcaaytgggaagcagcagacttaggcratgaagagagaaaacaaaagttcttgagacttatgggtgcaggaaagaaagaacacactggtcgtcttgttataggagatcacaaatcaacatctcacttccgaacaggggaagaagacaagaaaattaatgaagaactggagtctcagtaccagcagagcatggacagtaaactatcaggccgataccggcggcactgtggacttggcttcagtgaggtagaagatcatgatggagaaggtgatgtggctggannnnnnnnnnnnnnnnnnnngccggatgccgagagtccagatgactcagacagtgattctgagtctgagaaggaggagtctgcagaagaactccatgctactgagcatcctgatgatgcagaagac

SEQ ID NO: 3934 - DNA, 579 bp, Cricetulus griseus; identical to SEQ ID NO: 292

SEQ ID NO: 3935 - DNA, 581 bp, Cricetulus griseus; identical to SEQ ID NO: 293

SEQ ID NO: 3936 - DNA, 664 bp, Cricetulus griseus; identical to SEQ ID NO: 294

SEQ ID NO: 3937 - DNA, 574 bp, Cricetulus griseus; identical to SEQ ID NO: 295

SEQ ID NO: 3938 - DNA, 452 bp, Cricetulus griseus; identical to SEQ ID NO: 296

SEQ ID NO: 3939 - DNA, 508 bp, Cricetulus griseus; identical to SEQ ID NO: 297

SEQ ID NO: 3940 - DNA, 485 bp, Cricetulus griseus; identical to SEQ ID NO: 298

SEQ ID NO: 3941 - DNA, 578 bp, Cricetulus griseus; identical to SEQ ID NO: 299

SEQ ID NO: 3942 - DNA, 386 bp, Cricetulus griseus; identical to SEQ ID NO: 300

SEQ ID NO: 3943 - DNA, 495 bp, Cricetulus griseus; identical to SEQ ID NO: 301

SEQ ID NO: 3944 - DNA, 547 bp, Cricetulus griseus
gccaaactctgctcagcaaactgaccgaagctcacctgttagagccagtagtgaaaagaatgattgccttcgagggaaacgagatggagtcaacagtcttgaaagaaaattgaagagacgcccagaaagagaaggccttcccagtgaacggtgggatcgagttaaaaaaatgcggaccccccaaaagaagaaaatcaaattgagtcaccccaaggacatgaacaatttcaaattagaaagagagcgtagctatgacttagtccgtaatgctgaaacacattcgctaccctcagacacgtcctactcggagcaggaggactctgaggatgaagatgccgtctgtccagctgtgagctgcctgcagccagaaggagatgaggtggactgggtccagtgtgatggcagctgcaatcagtggtttcaccaggtctgtgttggtgtctctccagagatggcagagaaggaagactacatctgtgtgcgctgcatggcaaaggacacaccaagccgaaagtaaaaacaaaacacactcacttaatggaattca

SEQ ID NO: 3945 - DNA, 211 bp, Cricetulus griseus; identical to SEQ ID NO: 303
  misc_feature (70)..(113): n is a, c, g, or t

SEQ ID NO: 3946 - DNA, 344 bp, Cricetulus griseus; identical to SEQ ID NO: 304
  misc_feature (32)..(48): n is a, c, g, or t

SEQ ID NO: 3947 - DNA, 459 bp, Cricetulus griseus; identical to SEQ ID NO: 305
  misc_feature (94)..(108): n is a, c, g, or t
  misc_feature (405)..(421): n is a, c, g, or t

SEQ ID NO: 3948 - DNA, 578 bp, Cricetulus griseus; identical to SEQ ID NO: 306

SEQ ID NO: 3949 - DNA, 295 bp, Cricetulus griseus; identical to SEQ ID NO: 307

SEQ ID NO: 3950 - DNA, 573 bp, Cricetulus griseus; identical to SEQ ID NO: 308

SEQ ID NO: 3951 - DNA, 559 bp, Cricetulus griseus; identical to SEQ ID NO: 309
  misc_feature (441)..(465): n is a, c, g, or t

SEQ ID NO: 3952 - DNA, 593 bp, Cricetulus griseus; identical to SEQ ID NO: 310
  misc_feature (457)..(471): n is a, c, g, or t

SEQ ID NO: 3953 - DNA, 585 bp, Cricetulus griseus; identical to SEQ ID NO: 311

SEQ ID NO: 3954 - DNA, 509 bp, Cricetulus griseus; identical to SEQ ID NO: 312

SEQ ID NO: 3955 - DNA, 579 bp, Cricetulus griseus; identical to SEQ ID NO: 313

SEQ ID NO: 3956 - DNA, 578 bp, Cricetulus griseus; identical to SEQ ID NO: 314
  misc_feature (92)..(111): n is a, c, g, or t
  misc_feature (329)..(350): n is a, c, g, or t

SEQ ID NO: 3957 - DNA, 581 bp, Cricetulus griseus; identical to SEQ ID NO: 315

SEQ ID NO: 3958 - DNA, 600 bp, Cricetulus griseus
aaatataataaaaacaaagtgaagaaaaggggcaaatccaaaagtaggagtaagagcaaagagagatccaaaagtaaggaaagagaatcaaagcataacaaacacgaagacaagaggatgaggtcaagaagtaaagacagggatcatgagactattaaagaaaaagaaaaacaggtggattctaaagggaaagatcaggaaaggagtagaagcaaagagaattctaaacaggtagaatcaaaaagtgatgagcatgatcatagcaaaagtaaagaaaaggatagacgtgcacagtctawgagtagagaacgtgatctaactaaaagtaaacacagttacaacagtagaacaagggagcgaagcagaagcagggacaggagcagaagagtgcgctctataagccatgacagagatcgcagcagaagcaaggagtaccacaggtacagagaacaggagtataggagaagaggaaggtcacggagccgggatcgaagaactccaggacgatcaagaagtaaagacaggaggagaagaaggagagattcccggagctcagaaagagaagatagtcaaagtcgaaacaaagagaaatatagaagc

SEQ ID NO: 3959 - DNA, 444 bp, Cricetulus griseus; identical to SEQ ID NO: 317

SEQ ID NO: 3960 - DNA, 521 bp, Cricetulus griseus
  misc_feature (155)..(213): n is a, c, g, or t
gaagcagggagcaccctgatctgcaactgtggtgccagccctggaaacagcagtctgcagaggggagagtgcatcccagacacatccacatcacagacaccaggagcaaagaggagtccccaagctatagaactttgaatggggcattgtataannnnnnnnnnnnnnnnnnnnnnnnnnnnnnnnnnnnnnnnnnnnnnnnnnnnnnnnnnnagaagccccgcacctactacccagctgtggagcagaagctggtagtagagaccagaggatctgccctcgatgatacagtcaaccccctctgtgagaatggtgatgaccccctctcccctcgcctaagctggcctctcgaccaagacaggagcagaggggacagtgataccaaacctagctccccaaaggtgaaggaatacgtttcgaagaaggtcctgccggaagaatcccctgctctgaagctgctggacagatgcggataatggctggtgagtttctcacaccagtgggagttcaacctgctgacg

SEQ ID NO: 3961 - DNA, 551 bp, Cricetulus griseus; identical to SEQ ID NO: 319

SEQ ID NO: 3962 - DNA, 580 bp, Cricetulus griseus; identical to SEQ ID NO: 320

SEQ ID NO: 3963 - DNA, 305 bp, Cricetulus griseus; identical to SEQ ID NO: 321
  misc_feature (227)..(246): n is a, c, g, or t

SEQ ID NO: 3964 - DNA, 579 bp, Cricetulus griseus; identical to SEQ ID NO: 322

SEQ ID NO: 3965 - DNA, 567 bp, Cricetulus griseus; identical to SEQ ID NO: 323
  misc_feature (256)..(269): n is a, c, g, or t
  misc_feature (271)..(284): n is a, c, g, or t

SEQ ID NO: 3966 - DNA, 392 bp, Cricetulus griseus; identical to SEQ ID NO: 324

SEQ ID NO: 3967 - DNA, 140 bp, Cricetulus griseus; identical to SEQ ID NO: 325

SEQ ID NO: 3968 - DNA, 319 bp, Cricetulus griseus; identical to SEQ ID NO: 326

SEQ ID NO: 3969 - DNA, 558 bp, Cricetulus griseus
  misc_feature (30)..(30): n is a, c, g, or t
  misc_feature (32)..(33): n is a, c, g, or t
cgacttaggggcactcgctggcaagaatcncnnggaggtacgcccgagggacctcaggaaaccatgcccgaaaccacacagtgaagcagggactgccttcattcagacccagcagctccatgcagctatggctgataccttcctggaacatatgtgccgcctggacattgactccgcacccatcacggcccgcaacactggcatcatttgtaccattggtcctgcctcccggtctgtggagatgctgaaggagatgatcaagtctggaatgaatgtggctcgtttgaatttctctcatggaactcatgagtatcacgcagagactatcaagaatgtgcgaacagccacagaaagctttgcatctgaccccatcctctaccggcctgttgctgtggctctggacacaaagggacctgagatcaggactggactcatcaaaggcagcggcactgcagaagtagagctgaagaagggagccaccctgaagatcaccctggacaacgcctacatggagaagtgtgatgagaacatcctgtggctggactataagaacatctg

SEQ ID NO: 3970 - DNA, 579 bp, Cricetulus griseus; identical to SEQ ID NO: 328

SEQ ID NO: 3971 - DNA, 582 bp, Cricetulus griseus; identical to SEQ ID NO: 329

SEQ ID NO: 3972 - DNA, 568 bp, Cricetulus griseus; identical to SEQ ID NO: 330

SEQ ID NO: 3973 - DNA, 578 bp, Cricetulus griseus; identical to SEQ ID NO: 331
  misc_feature (95)..(112): n is a, c, g, or t

SEQ ID NO: 3974 - DNA, 203 bp, Cricetulus griseus; identical to SEQ ID NO: 332

SEQ ID NO: 3975 - DNA, 345 bp, Cricetulus griseus; identical to SEQ ID NO: 333
  misc_feature (294)..(310): n is a, c, g, or t

SEQ ID NO: 3976 - DNA, 569 bp, Cricetulus griseus; identical to SEQ ID NO: 334

SEQ ID NO: 3977 - DNA, 577 bp, Cricetulus griseus; identical to SEQ ID NO: 335
  misc_feature (109)..(126): n is a, c, g, or t

SEQ ID NO: 3978 - DNA, 578 bp, Cricetulus griseus; identical to SEQ ID NO: 336

SEQ ID NO: 3979 - DNA, 566 bp, Cricetulus griseus; identical to SEQ ID NO: 337

SEQ ID NO: 3980 - DNA, 563 bp, Cricetulus griseus
caatggccttcgcaaatctgcgcaaagtgctcatcagtgacagcctggacccctgctgccggaagatcctgcaagatggagggctgcaggtagtggagaagcagaacttgagcaaggaggagctgatagccgagctgcaggactgcgaaggccttattgtccggtctgccactaaggtcaccgctgatgtcatcaatgcagcagakaagctccaggtggkgggcagggctggcacaggcgtggacaacgtggatctggaggctgccacgaggaagggcatcctaktcatgaacacccctaatggaaacagcctcagcgccgcagaactcacctgtgggatgatcatgtgcctggccagacagattccccasgcaacagcttcgatgaaagatggcaaatgggaccggaaaaagttcatggggacagagctgaacggaaagacactgsgaattcytggcctgggcagaatyggaagagasgtggccacccgaatgcagtcctttgggatgaagactgtaggctatgaccccatcatttctccagaggtggcgggctcctttgga

SEQ ID NO: 3981 - DNA, 600 bp, Cricetulus griseus
agaccaatacagagcaactgattttgttgttcccgggcctggaaaagtagagataacctacacaccaaaagatggaactcaaaaggtgacatacgtggtgcataactttgaagaargtggcggtgttgccatgggcatgtacaacgaggataagtcaattgaagattttgcacacagttccttccagatggctctgtctaaaggctggcctttgtatcwmagcaccaaaaacactattctgaagaagtacgatggacgtttcaaagacatctttcakgagatctatgacaagcaatacaaatcccagtttgaagctcagaagatctggtatgagcataggctcattgatgacatggtggcccaagctatgaaatcagagggaggctttatctgggcctgtaaaaactatgatggcgatgtgcagtcagactcagtagcccaaggttatggttcccttggcatgatgaccagtgtgctgatttgtccagatggtaagactgtagaagcagaggctgcccatggcactgtcacacgtcactaccgcatgtaccagataggacaggagacatccaccaaccccattgcttccatttttgcttg

SEQ ID NO: 3982 - DNA, 583 bp, Cricetulus griseus
catacccaggctatccccctacmggsyrsysacctktccctgsmtatcmkcctgcaggtcaggagtcatcctttccccctccgggtcagtatccctatcccagtggctttccaccaatgggaggaggtgcttacccaccagcaccaagtgtcggctaccccggggctggaggctatgctacacctggaggttatccagcccctgggggctatcctgttagcccaagtccagggggtgttccagtctatccgggaggacaaggctttggagccccacctggtggagcaggcttttctggctatccacagccacctgcacagtcttatggtggtggaccagcccatgttccagtaccaggtggctttcctggaggacagatgccttctcagtaccctggaggacatgctccttaccctagccagcctgctgcgatgactcagggcacccaagggacaatcccgagcagcctccaactttgatgctatgagagatgcagaaattctccgcaaagcaatgaagggatttgggacagatgagcaagcaattgtggatgttgtgtccagccgttccaatgaccagaggc

SEQ ID NO: 3983 - DNA, 579 bp, Cricetulus griseus; identical to SEQ ID NO: 341

SEQ ID NO: 3984 - DNA, 579 bp, Cricetulus griseus; identical to SEQ ID NO: 342

SEQ ID NO: 3985 - DNA, 665 bp, Cricetulus griseus; identical to SEQ ID NO: 343
  misc_feature (565)..(565): n is a, c, g, or t

SEQ ID NO: 3986 - DNA, 600 bp, Cricetulus griseus
cagctgggagacaaattggactcattcattcagccaccagagtgcagtagtaacgatggtgtggagctccggcagcggagcagaggtgacccgacagcaggctcggcccagagggcttctcaccatggcctagaacagtacctgtccagatttgaggaagcgatgaaactgcgcaagcagctgatcagtgagaagcccagccaggaagatggaagtacaacagaggaattcgactcttttcgaatattccgattggtggggtgtgctcttcttgctcttggcgtcagagctttcgtctgcaaatatttgtctatattcgctccatttcttactttgcaacttgcgtacatgggactatacaaatattttcccaagggtgagaagaagataaagaccacagtgctgacagctgcgctgttgctatctggaattcctgctgaagtgataaatcggtccatggagacctatagcaaaatgggtgaagtcttcactgatctctgtgtctactttttcacttttattttttgtcatgaactgcttgattattggggttcagaagtaccctgaaacctgaagaactgagaacaagtttacaaagtg

SEQ ID NO: 3987 - DNA, 495 bp, Cricetulus griseus; identical to SEQ ID NO: 345

SEQ ID NO: 3988 - DNA, 600 bp, Cricetulus griseus
  misc_feature (153)..(186): n is a, c, g, or t
acatggagaaaaggacttcactgaggatgtcaactctgcttttgagttcctgttgaagctcacgcccttgttggacaaagctgaccagcgctgcaattgtgactgcacaaatttcctcctccaagaatgcaacaagcagggacttctgtctgnnnnnnnnnnnnnnnnnnnnnnnnnnnnnnnnnnaacagatcgggacccccagctaaaatcatcagaaaatgccaacatccagcctaaccctgggctgatcctccgggcagagcccaccgtcacaaacattctcaagacgatggatgcagaccactccaagtccccagagggactgctgggggtcctgggacacatgctgtccgggaagagcctggacttgctgctggctgssgckgctgccactgggaagcttaagtcctttgcccggaaattcatcaaggcaggagctgcagctgatctcacttctgccacagccaccgctacctcttcggaagggccaggaaggagggtgaggctgtgccatgaaacctcacccagtagctgccgagaacccccgcaacccctcatcgctggagccggagatgggagaagaagagtaacagagag

SEQ ID NO: 3989 - DNA, 600 bp, Cricetinae gen. sp.
tccgcagccatgagtatgctcargctacagaagaggcttgcctctagcgtcctccgttgtggtaaaaagaaggtctggttggaccccaatgagaccaatgaaatagccaatgccaactcccgtcagcagataaggaagctgatcaaagatgggctgatcatccggaagcccgtgactgttcattcccgggcccgatgccggaaaaacactttggctcgacggaagggcaggcatatgggcatagggaaacggaagggtactgccaatgcgagaatgcctgagaaggtgacctggatgcgaaggatgcggatcctgcgtcgacttctcaggagataccgggaatccaagaagattgaccgccacatgtaccatagcttgtacctgaaggtcaaagggaatgtsttcaaaaayaagcggattctcatggagcacatccacaarctgaaggcagacaaggcccgcaagaagctcctggctgaccadgctgargctcgcaggtctaagaccaakgaagcacgaaagcgccgkgaggarcgyctccargccaagaaggaggagatcatcaagactctgtccaakgaggaagagaccaagawataa

SEQ ID NO: 3990 - DNA, 600 bp, Cricetulus griseus
ccaagctggtcattgtcacagcgggggcccgtcagcaasagggagagagccgactcaatctggtccarcgaaacgtgaacatcttcaagkksatsattcccaacgttgtgaaatacagtccagactgcaagctgcttattgtttcaaacccagtggatatcttgacctacgtggcttggaaaataagtggctttcccaaaaaccgagttattgggagyggctgcaatttgsatyctgcycgatyccgttatctgatgggagaaaggttgggtgytcacccactaagctgtcatggatgggtcctakgggagcatgsagactccagtgygcctgtgtggagkggasygaatgtagcyggtgtctccctgaagaatctsaatccagagctgkgcactgataccgacaaggagcagtggaatgasgttcacaascaggtggttgwcagygcctatsargygatcmmwcygaasggttatacatcctgggccattggtctgtctgtggctgacttggccgagagcataatgaagaatcttaggcgggtgcatcccatttctaccatgattaagggtctctatggaatcaaggatgatgtcttcc

SEQ ID NO: 3991 - DNA, 581 bp, Cricetinae gen. sp.; identical to SEQ ID NO: 349
  misc_feature (471)..(489): n is a, c, g, or t

SEQ ID NO: 3992 - DNA, 483 bp, Cricetulus sp.; identical to SEQ ID NO: 350
  misc_feature (345)..(345): n is a, c, g, or t

SEQ ID NO: 3993 - DNA, 532 bp, Cricetulus griseus; identical to SEQ ID NO: 351

SEQ ID NO: 3994 - DNA, 600 bp, Cricetinae gen. sp.
ctgccgagcttccagcgcctcgggacgcgatgaggacctgggcttgcctgctgcttctcggctgcggatacctcgcccatgccctggccgaggaagccgagataccccgagagctgatcgagcggctggctcgaagtcagatccacagcatccgggacctccagcgactcttggagatagactccgtagggrctgaggatgccttggagacaagcctgagagcccacaggtcccaygccattaagcatgtgccsgagaagcggcctgtgcctattcgcaggaagagaagyattgaggaagccatycctgcagtttgcaagaccagracggtcatttacgagatacctcggagccaggykgaccccacatcggccaacttyctgatttggccyccrtgtgtggaggtkaarcgctgcaccggctgctgcaataccagcagygtcaagtgccagccctcaagggttcaccaccgtagtgtcaaggtggccaaagtggagtatgtcaggaagaagccaaaattgaaagaggtccaggtgaggttagaggaacacctggggtgtacatgtgcgacctccaacctgaacccagaccatcgggagg

SEQ ID NO: 3995 - DNA, 502 bp, Cricetinae gen. sp.; identical to SEQ ID NO: 353

SEQ ID NO: 3996 - DNA, 623 bp, Cricetinae gen. sp.; identical to SEQ ID NO: 354
  misc_feature (525)..(543): n is a, c, g, or t

SEQ ID NO: 3997 - DNA, 547 bp, Cricetulus griseus; identical to SEQ ID NO: 355

SEQ ID NO: 3998 - DNA, 466 bp, Cricetulus griseus; identical to SEQ ID NO: 356
  misc_feature (291)..(307): n is a, c, g, or t

SEQ ID NO: 3999 - DNA, 565 bp, Cricetulus griseus; identical to SEQ ID NO: 357
  misc_feature (96)..(110): n is a, c, g, or t
  misc_feature (216)..(241): n is a, c, g, or t

SEQ ID NO: 4000 - DNA, 496 bp, Cricetulus griseus
gcggtagcagcttcggcgtccgcggtttagtcgccaacatgcagctctttgtgcgcgcccagggtactacacacactcgaggtgaccggccaagagacggtcgctcagatcaaagctcatgtggcctcactggaaggcatttccccggaagatcaagtcgtgcttttggctggctcgccgctggaggatgaggccaccctaggccagtgtggcgtagaggccctgactactctggaagtagctggtcgcatgttgggaggtaaagttcatggttccctagctcgtgctggaaaagtgagaggtcaaactcccaaggtggccaaacaagagaaaaaaaagaagaagacaggtcgggccaagcggcggatgcagtataacccgtcgctttgttaacgtggtgccaacctttggcaagawkaarggccctaatgctaattcctaagtccttctgtgattcttgcactctaataaagccactttgcccaraaaaaaaaaa

SEQ ID NO: 4001 - DNA, 600 bp, Cricetulus sp.
atgggcgcacaccaactccagaggagctgccgccctgctacgagggcacagactggtcaggctgcacgctgcaggagttcatggattgcccttacaacctggccaacaaccggcaggtgcgcatgctggctgacctcagcctggtgggctgctacaacctgtccttcatccccgagagcaagcggscscagctgctgctggagagcgccaagaagaacctgcgcggcatggccttcttcggcctcaccgagttccaacgcaagacgcagtacctatttgagcggacgttcaaccttaagttcatccggcccttcatgcagtacaacagcacgcgggcgggcggtgtggaggtggatgaggacaccatccggcacatcgaggagctcaacgacctggacatgcagctgtatgactatgccaaggacctcttccagcagcgttaccagtacaagaggcagctggagcgcagggagcagcgcctgcgcaatcgcgaagagcgcctcctgcatcgctccaaggaggcactgccacgggaggacacggaagagccaggtcgcgtgcccaccgaggactacatgagccacatcattgagaagtggt

SEQ ID NO: 4002 - DNA, 594 bp, Mesocricetus auratus
taggcagaggcgggcgagtctctgtgagtttgaggccagtctggtatacaaagcaagttccagaacagtcgcaggtacacagagaaaccatgtctctaaaaacacacataaaacaaaacaaacaataaagaaaagtgtctctacctcttaatcatgaactatcaatatctccccagctaggggtaggggctcatgaccccctccacttccatgctggaatgttaattgagcaggtattatgaagtcttgtgaagacagccacagatgctgtgagtaggtgagtgtagtggtcctgtcctgtctaaaagacactgttagttgaggagatttcacttaaaatcttctcctcatatatgcaagaaaatattctaggaaacgtatttgactggataagatttatttgtctggactattcacctttgtggagttattggatgtatattataaaaggtggaggaaaagttgttaatcaccatcaagcaatgactatcttttttatcactattataggcactgctataaactttgcaaggttttgcattggattggatttcatatactgccttttcagtagcacccaaacttcttactagt

SEQ ID NO: 4003 - DNA, 1400 bp, Mesocricetus auratus
acagcgctatggagatgtgttcagcctgcagatggcctggaagcctgtggtggtratcaatggactgaaggcagtgcgggaagtgctggtgaactgtggagaggacaccgctgaccgycctccagtgcccatctttaatcacstgggytwcsggcmyaamtctcaaggtgtggyrtttgcacgttatggaccccagtggagagagcagcgtcgattytstgtgtctaccatgcgagacttcggcgtgggcaagaagtcactggarcagtgggtgacagaggaggctggccacctctgtgacgcyttcacccaggaggctggrcatccctttaatcccaycaccctcctgaataaaagtgtatgcaatgtgatttcatccctyatttatgcccatcgcttcgactatgaagaccctttcttcaacaagctgctcaaraygttacaggaaagytttggagaggacwctggcttcattgctgaggtgctgaacgcagtcccagtgctgcttcggatccctgggctgccaggcaaagccttccccaagctaaccgcattcatggattccctatataaratgytgattgagcacaagacaacctgggatcctgcacagccaccccgaggtctgacagatgccttcctggctgaggtggagaaggccaaggggagacctgagagcagcttcaatgatgagaacctgcrtrtggtggtrgctgacmtgttcattgcaggratggtgaccacstcaaccacactgtcctgggccctgctattgatgatcctgcacccggatgtgcagagccgygtscaacaggaaattgacgatgtcatagggcaggtgcggcgtccagagatggcagaccaggcccgcatgccctacaccaatgctgtcattcacgaggtgcagcgattcggrgacattgccccagtgaatrtaccacatatgacatcccrtgatgtcgaagtacagggtttcctcatccccaaggggacgaccctcatccccaacctgtcctcagtgctgaaggatgagactgtctgggagaagcccctccacttccatcctgaacacttcctggatgcccagggccgctttgtgaagcasgaggccttcatgccattctcagcaggccgcagagcatgtctgggggagcccctggcccgcatggagctcttcctcttcttcacctgcctcctgcagcgctttagcttctcggtgcccgctgggcagccccggcccagcgaccaaggcrtcttcgccttgcctgttaccccgaccccctacgagctctgtgcagtcgtgcgctagcaaggacagcagctccatcctcctccccagctcgtgctgcgtgatgtccaataaaccagacctgtggctgtcamwmaraaaaaaaaaaaaa

SEQ ID NO: 4004 - DNA, 600 bp, Mesocricetus auratus
cccagatgtgcagcgccgagtccaacaggagatcgatgacatcttaggaccggggagaagcccagagatggcagaccaggcccgcatgccctacaccaacgctgtcattcatgaggtgcagcgctttgcagatattgccccactgaacttgccatgcatcacatcccgggacattgaagttcagggattcctcatccccaaggggacgaccctcatcaccaacctgtcctcagtgctgaaggacgagaccgtctgggagaagcccctccatttccatcctgaacacttcctggatgcccagggctgctttgtgaagcaggaggccttcatgccattctcagcaggccgcagagcatgtctgggggagcccctggcccgcatggagctcttcctcttcttcacctgcctcctgcagcgctttagcttctcggtgcccgctgggcagccccggcccagcgaccatgtagtcttaggtgttttgaaaagcccagccccctaccagctctgtgcagttcctcgctagcaggacaccaattcaatccaccctagctttgtctgatcctcccacagtaaaacagttttgtgactgtcaaaaaaaaa

SEQ ID NO: 4005 - DNA, 1400 bp, Mesocricetus auratus
  misc_feature (36)..(51): n is a, c, g, or t
  misc_feature (245)..(273): n is a, c, g, or t
  misc_feature (385)..(410): n is a, c, g, or t
caagactctctaaacaggtcgaccttgctgagttcnnnnnnnnnnnnnnnncctgtgactcagcacctgagctgcatgctgcaggaacgcctgcatctggggcagcggcagctgcagcagcacgaaactcaggcagcggagccccagcagcagctgggtcatcagacggcgccccagcaagagctgtgtcaccagacggcgccccagcaacagatgtgtcttcagatggcgccccagcaagagcnnnnnnnnnnnnnnnnnnnnnnnnnnnnnctgtgtcttcagatggcgccccagcagcagctgtgtcaccagacggcaccccagcaacagctgtgtcttcagatggcgccccagcaagagctgtgtcaccagacggcgcccnnnnnnnnnnnnnnnnnnnnnnnnnntcatgcgcaagtcaatggcatgtttgcaagttggaaccccacccctctcgtgcctttcagctgtcctcagcaggaactgaagcattatgacgtcttttcagacttgcagggggcgattgaggagttcccctacaaatctgagatggacagtatgccttacacacagagctttgctccctgtaatcagtctgtgctaccccagcgttccaagtgtgcacagctggacttgcctggaaagggtttcgaaccatccctgcaccccaacacttctaatgtaggagattttgtcacttgtttacaagttcccgaaaaccaaagacacgaggtgcatccacagtcggccatggtcgctcctcagacatactatgctggggccatgtccatgtaccagtgccagccaggacctcagcacgtccctgtagagcagatgcagtacagccctgcagtcccagactcccaggcatttctaaacaagtttcagaatcagggagtgttaaatgaaacctattcgtctgaattaaacagcgttggtcacaggcagaccactgctcatcttcatcaccctgcagaagggaggccgtttcctgatatcacacccagcggattcctgtagctttgggaacaagataccgggactgtctgtccatgttggccatcagcactctttttccaagccagattttaatctttgtgttgggaagaggagtttaaaaactgttatcggttacctataaaatgggaagctctgcagsagcatagggagagaccacaagcctttaagtagctttagcacctcagcgtgcacatgcccacarcggagagctttggggttctggagagctgagcgtctccactcagtgaccagccagaaagacaacttcaggattcccgatggtgtaccaaatacagttagaagactaattgattttaacctctctgtgtctcagatgttagaataaatggtttggtgcttttatcaaaaaaaaaaaa

SEQ ID NO: 4006 - DNA, 1277 bp, Cricetinae gen. sp.
tttcttctggaggcattccggaagacaaacggtgctctcattgaccccaccttctacctgagcagarcrgtctccaacgtcatkagctccatcgttttcggcraccgctttgactatgaggacmaagagttcctgtcrctgctgargatgatgmyrgraasyttccagttcacagsywcmtccactgggcagctctacgagatgttctcttcrgtgatgaarcrcctgccrggrccccagcaamargcctwtaaggrrctrmaggsrctggargacttcatarccaagaaggtggaacagmaycagmgcaccctggayycyaattccccaagggacttcatygactccttcctcatccrcatgmaggmggagaagaagaaccccaayacagarttytwcatgaaraayytggtgytrackacrctraacctcttckytgctggcacagagaccrtcagyacraccytacgctatggcttyctsytgctcatgaagcacccagaygtggaggccaaartccawgaggagatyracmrggtgattggcargaaccgrcagcccaaatatgaggaccgmwygaagatgccytacacagaggctgtgatycatgagattcarmgmtttgsagaydtratmcccatgggybtgsctcgaagggtcaccaaggacaccaagttycgggrcttcytyatycccaagggcactgamgtgtttcctrtgctgggctctgtgctgarsgacyccaarttyttctccaaccccaaagacttcaayccamagcayttyctdgatgrcaakrkkcagtttaagaagaatgatgcmttyrtrcccttttccwtaggaaarcggwactgcttyggagaaggactggckagaatggagctcttyctctwcctcacrawcatcctgcagaacttycrcytcagatccycacaggcaccccrdgacatcgatgtgtcccctmramtsgtgggrtttgsmacvmtyccaccaaactayaccatgagyttyttgtcccrttrakcmakgkctkgatrwkggwmaarggarkgatggagaccmgsytagtgtgggwvattgkrahttrgadggagtcakagggacargararacagaggacaygaatmracttgstgaagagagactgbcatttccaaggyagkgwgagagaaagrrgaaatktatactatgtkgtgaatartrayratrrtaatwataataatracastagmyaytaytwmtaktaataataataataaaataataatrgcgacatt

SEQ ID NO: 4007 - DNA, 1400 bp, Cricetulus griseus
acgtagcacttgttttcttccttctgagattcccccaaaatagttgcttcaatccgactgccacgagtcctgctgacgccttgagattcttttgggagcaggtccctgacccacgttcatctccgagccggatcactactccgcaagcctgagggaggaggcggaccttcgcgaacagagggcccctcctcggaggggagggaccgacacccagggccttgttctccagcagttgcagcgccgggtcccaggacttagtcctgcgccacggttctgaccacgggtggcccgctgcccagccggctctgcaagccggtggtccgcgtgtssmtccgatatgtcgtcctgcagccgcgtggcgctggtgaccggggctaacaagggcatcggctttgccatcacgcgtgagctgtgtcgcaagttctcgggggacgtggtgctcaccgcgcgggacgaggagcggggcaaggcggctgtgcagcagctgcaggcagagggcctgagcccccgcttccaccagctggacatcgacgacctgcagagcatccgcgccctgcgcgactttctgcgcaaggagtatgggggacttaacgtgcttgtcaacaacgcgggcatcgcctttagaatggatgatccaacaccctttgacattcaagctgagatgacactgaagacgaacttttttgccactagaaatgtctgcaatgagttactacccataatgaaaccacatgggagagtggtgaatgtcagcagtctgcagggctcaaaggctcttgaaaactgcagtgaagatcttcaggaaaggttccgatgtaacacacttacagagggggacctggtcgacctcatgaaaaagtttgtggaggacacaaaaaatgaagtccacgagagggaaggttggccagactcagcttacggggtgtccaagctgggggtgacagtcctttccagaatcctggcccagcagctgggtgagaagcgtaaagcagacaggattctgctcaatgcttgctgcccagggtgggtgaagaccgacatggcgagggaccagggctccaggactgtggaggaaggggcggaaaccccagtttacttggccctcctgcctccagatgccactgagcctcagggccagctagtctgtgacaaagtcgtgcaaacatggtgaacatctgctttgggacttaatggtttagtaactgytsgagagggakmcaaatggaggctgctgtagtttgattctctttgcacattgagaaggaaggtccgtcatacctgtgaggttctacaatctgaatctgaatgatgtgcaatgtccaaactctctatggcccttggtttttcatccagttcattgtgcctgcttgtttttcaaataaaaaaatagtttttatttt

SEQ ID NO: 4008 - DNA, 600 bp, Cricetulus griseus
gactatggacaaagatccaatctccaagttggggarggaaaacagtgcaacattgataaaagcacagagctgaagattcactcacaygggcaaggtcaatgtctsatttccgggtggacagctgcagcagcctctctgcagacttctcctgcagtctcccctggctggggcttccaaaacyccttgaggaaaaaagacagagatgcccatgagccgaccyagccmtttttctggctggattttaaytgtwcaacacgctttgcttgctctgagcctgcaaaggaactggcctgtttctttattgaacagatttatacacctaagcccgatatcagaaggtgakccatcaccgcgtaaatatacaccattaagacaagaggacagttacagggagtgtaaagctcacaagaacytgtccccgawttaccacgccctcctggaggcggggtcagatgatgcgcatgcgccttgagcccatgccggcttaaccaaacaagctgtccytagaaaaaccctaggagttaggattggctctcctcgtgcgcggggaacctcagrrtccgtgcyctgtaaccgcctcyctstgaacacccagccatg

SEQ ID NO: 4009 - DNA, 1400 bp, Mesocricetus auratus
gtgggaatcctgtacatgggcgggcagctggtggtcagaggggctgtcagcagtggagaccttgtctcctttgttctytaccarctgcagttcaccactgccgttcaggctctgctctcctactatccctggatgcagagggctgtgggctcctcagagaagatatttgaatacctggaccggagtccttgctctccgctcagtggctctttggcgcccttaaacatgaaaggtctygtcgagttccaagacgtctcctttgcctatccaaaccatcccgatgwccaggtgcttcaggggctgacgttcacgctgcatcctggaaaggtgacggcgttggtggggyccaacgggtcagggaagagtaccgtggccgccctgctgcagaatctgtaccagccgacggggggccagctgctgctggacggacagcccctggtccagtatgatcaccactacctgcacactcaggtggccgcggtgcaacaagagccactgctatttggaagaagttttcgagaaaatattgcctacggcctgacccggaatccaaccatggaggaaatcacagctgtggccaaggagtctggagcccacgatttcatccctggactccctcagggctatgacacagaggtgggtgagtctgggaaccagctgtcaggggggcagcggcaggctgtggccttggcccgagctttgatccgaaaaccgcgcctgcttatcttggatgacgccaccagtgccctggatgccaacaaccagttacgggtccagcggctcctgtatgagaaccccggaccggcttctccaaccgtgctgctaatcacccagcagctcagcctggtggagcaggcgcaccacatcctgtttctcgargaaggctcggtttgcgagcagggcacccacctgcagctcatggaaaagactggaggtcgctaccgggccatggtggaggctctcaaggctccttcagatggacaggcctctggacctgccgaccgccctccagcactgtcctctgctaggtgtggcggagaacccgggagcaaagatattatcacacccattgaccaggctcagttgaggaactgaggtactggtcacaggataaaatgtaacatctaggagacggctggagtttaccatgaatgctattcccaccccggccccttagwtagagtcgatttcaggtacctcaggctgaccttgaactcctgcctcccccctcctggtactgttctggtatcacagcacgggcaaacctggtttatgcggtgttggatgagaagaaatgctcacagtgaagcagtttgggattaacggaaggcataggctggcctatggataacccgtgrgctactgatatttataataaaactggcgttttgkactgcgtt

SEQ ID NO: 4010 - DNA, 600 bp, Mesocricetus auratus
acttcataggggaaatgcctgatgggatacacacagaaataggggagaaggggagccagttagccgtgggacagaaacaacgtctggccattgcccgggcccttgtgcggaacccacgggtcctgatcctggatgaggcgaccagtgccctggactcccagtgtgagcaggctctgcaggcctggcgatcgaagggggacaggacggtgctggtgattgcccacaggctgcacacggttcagaacgttgaccaggtgctggtgctcaagcaggggcagctggtggagcacagccagctcagggaggaccaggatgtctacgctcacctggtacagcagcagcggctggaggmrtgaggcctccgcacacagagccacccactgagtgctctcaggaccagacccacggggactgtgctggaggctggggtcgggataaagactgggaccatttcggactcttgtatgttttggtgggcttgagtgggtgagagttgggggatggggtggtcgctgggtggagtgagtgttttgtggttctagaaacattattattattttttgctgattatagtaaatatgtatagaaacgttttccctt

SEQ ID NO: 4011 - DNA, 600 bp, Cricetinae gen. sp.
aacagaccagtgtataccacttctcaacaagtcggaggtttggttacatatgtcctcagggaaatctacgaattgagaaaagagttgtgtaataacaaccctggctgtatggacaatgactatgtgttgttagaaaataatctggaacttccggtgatacaaakaaatgatggmtgcywccaaactggatacaattgggaaatttgcctaytgaaaatcacctctggtcttctggactaccagatctacytggagtttgtgacsaacaatgtacaagataacaagaaagacaaagcmagagtcattcagagcaccaycaaaaccctaagtcagatcttcaaacaagaggtaaaggrtccagataaaatagtcaygcctagcccracytccaaggccatcctratrgagaagctggagtcacaraagsagtggccaagraccaagaccatmraactcatcctgaaagcacttgaagaattcctagaagtcaccatgaggtctactcggcaaaactagtgtgctgtgccttagcataccgatctgtggacattcactgtggtcagaaaacatatcctgtcattggggatctaccttatgttg

SEQ ID NO: 4012 - DNA, 583 bp, Cricetinae gen. sp.; identical to SEQ ID NO: 370
  misc_feature (148)..(168): n is a, c, g, or t

SEQ ID NO: 4013 - DNA, 469 bp, Mesocricetus auratus; identical to SEQ ID NO: 371

SEQ ID NO: 4014 - DNA, 138 bp, Mesocricetus auratus; identical to SEQ ID NO: 372

SEQ ID NO: 4015 - DNA, 138 bp, Mesocricetus auratus; identical to SEQ ID NO: 373

SEQ ID NO: 4016 - DNA, 138 bp, Mesocricetus auratus; identical to SEQ ID NO: 374

SEQ ID NO: 4017 - DNA, 138 bp, Mesocricetus auratus; identical to SEQ ID NO: 375

SEQ ID NO: 4018 - DNA, 1062 bp, Cricetinae gen. sp.; identical to SEQ ID NO: 376

SEQ ID NO: 4019 - DNA, 600 bp, Mesocricetus auratus
ttgaagattttgaaagaaaagccagggaagtgtgtgataacttggagagcttcacttcaggcagtcctttcctatgcatggatctcagttacatcacggctttattaaaagatggctttggttttgcagatgggacccttttacagctcacaaagaaagtgaacaacatagagacgggctggcctgggggccacctttcacctgctgcagtctctgggcatctccagctgaggctcagcgtgcccttggaaacctgcacttctgaacttctttttacaggaaggagaggactcgggcattttctgcaactacgctggcgaaagcctggcctgaaacccattgactggctttattaggagggagggggtttataatgagtgttgccccttgagcctagtgatttggtcttaatcagttttgcacatctaatgtgaacagctccctaaccacttggcaggtgcacagctggtgccagagtacaaatcttttgagattctttgtatgtcacagagtctgtgaagaaaaaagagtaggtttggaactccatgttagattgcgagttcagagatgggtcattgggaaccaaagaaaaatctcatt

SEQ ID NO: 4020 - DNA, 219 bp, Cricetinae gen. sp.; identical to SEQ ID NO: 378

SEQ ID NO: 4021 - DNA, 1282 bp, Cricetulus griseus; identical to SEQ ID NO: 379

SEQ ID NO: 4022 - DNA, 600 bp, Mesocricetus auratus
ccttaggttggctctgactgtaccaccatccactataactacatgtgtaatagttcctgcatggggggcatgaaccggcggcctatcctcaccatcatcacgctggaggaccccaggtaggcagcctcttgctgtgttcctgttggcgtgttcctccccagtctgtctctggtccatgccccacccgctgccacatgcctaccctttagctcttgctccgcctgcatacatgaagtctctggtttactcacatttggagtaggaccagagttcttactgtctcgtgctctccctcctctcaccctgggtagtgggaacctgctgggacggaacagctttgaggttcgtatttgtgcctgccctgggagagaccgtcgtacagaggaaaaaaatttccaaaagaagggagaaccttgcccagaactacccccaaagagtgctaaacgaggtaagcaggtgagacaaagagggcagaggaggaggttcagcttcaccggggaaatttactctctttcctttttcacagcattgcctaccaacacaagctcctctccccagccaaagagaaaaacacttgacggagaatatttcacccttaag

SEQ ID NO: 4023 - DNA, 600 bp, Cricetulus sp.
catcgagtatgtraagactttggrgtaatagcaacctttgacyccaagcccattcctgggaactggaatggtgcaggctgccataccaactttagyaccaagrccatgcgggaggagaatggtctgaagcacatcraggaggccatygagaaactaagcaagcggcaccggtaccayattcgagcctacgatcccaaggggggsctggacaatgcccgtsgtctgactgggttccacraaacgtccaacatcaacgacttttcwgctggygtcgccratcgcagtgccagcatccgcattccccggactgtcggccaggagaagaaaggttactttgaagmccgcygcccctctgccaattgtgacccctttgcagtgacagaagccatcgtccgcacatgccttctcaatgagactggcgacsagcccttccaatacaaaaactaattagactttgagtgatcttgagcctttcctagttcatcccaccccgccccagctgtctcattgtaactcaaaggatggaatatcaaggtctttttattcctcgtgcccagttaatcttgcttttattggtcagaatagaggagtcaagttctt

SEQ ID NO: 4024 - DNA, 600 bp, Cricetulus griseus
gttccttggcctgaggagtaaggtaggcccaggtgtggggctcttaagtcatgtctgaggcaggtgtgcacaagtttgaggtcttgttccgccagcatctgaggagattgggttgggaactggtatgcatgtcaccatctgaggtttagcccagatcgggagtcctcttcatcagcattgagaaagtagagactggcacaggtcataatgaggtgggtcaagcatggatatgaggccctggttctgccatcaccgagacggcaaaggctagcayaggtatgagactkccttcctgccagtgctgaggaamtgggagccwacagaggtttgaggccttgggtctgccaggaagaaaaggccagctgcggtaacatctttgatttgacgcgtccctcacgtagtctgccttgctggccagcatgragagtcactagttcctggatctgctgtctgaactgggmagagtcgggttgggtccagccctccaggctgttacctgtggaagattggctttctggggacaggtgtggcaggagggaggggggtagggtgtgcctgccctcctccagtgccgtttccttctctcctagtgggtaggtg

SEQ ID NO: 4025 - DNA, 790 bp, Mesocricetus auratus; identical to SEQ ID NO: 383

SEQ ID NO: 4026 - DNA, 600 bp, Mesocricetus auratus
ctcctgtttgctcctaatttgctcctggacaggaatcagggcaagtgtgtggagggcatggtggagatctttgacatgttgctggctacatcagctcggttccgcatgatggacctgcagggagaggagtttgtgtgcctcaaatctatcattttgcttaattctggagtgtacacatttctgtccagcaccttgaagtctctggaggagaaggaccacatccaccgggtcctggataagatcacagacactttgattcacctgatggccaaagctggcctgacactgcagcagcagcatcgtcgtctggcccagctcctcctcattctttcccacatccggcacatgagtaacaaaggcatggagcacctctacaacatgaaatgcaagaacgttgtacccttctatgacctgttgctggagatgttggatgctcaccgcctgcatacccccgtcagtcgcatgggggtctccccagaggagcccagtcagagccagctgaccaccaccaactccacttcatcacattccttacaaacctactacatcccgtcggaagcagagagtttccccaacacaatctgagacctcccaggctcc

SEQ ID NO: 4027 - DNA, 300 bp, Cricetulus griseus
agccagcctctggcctccaagcaggagaaggacgggactgagaagcgaggccggggtaggccacgcaagcagcctccggtgagtcctgggacggcgctggtagggagtcagaaggagcccagtgaagtgccaacaccgaagagrcctcggggccgaccaaagggaagcaaaaacaagggcgctgccaagacacggaaagctaccacagctccagggaggaaaccaaggggcagacccaagaaactggagaaggaggaagaggagggcatctcccaggagtcctcggaggaggagcagtga

SEQ ID NO: 4028 - DNA, 600 bp, Cricetulus griseus
actcacaaagaacggcagcactcagataccatggtgttcctttacctgtgggtggtcttttgtgccatcagttcctgctacaccctcatctgggatctcaagatggactggggtctcttcgataagaatgcaggagaaaacactttcctccgggaagaaattgtataccctcaaaaggcctactactactgtgccatcatagaagatgtgatactgcgctttgcttggactatccaaatctctattactgctacagcttttcagcctcatgttggagacatcattgctactgtctttgctccccttgaggttttccgacgatttgtatggaacttcttccgtctggagaatgagcatctaaataactgtggtgaattccgtgctgtgcgggacatctctgtagccccactgaatgcagatgatcagacactccttgagcagatgatggaccaggaagatggggttcgaaaccgccagaagaatcggtcatggaagtacaaccagagcatatctctgcgccggcctcgccttgcatcccaatccaaggctcgagacactaaggtattgatagaagacacagatgaygaagctaacacttga

SEQ ID NO: 4029 - DNA, 477 bp, Cricetulus griseus; identical to SEQ ID NO: 387

SEQ ID NO: 4030 - DNA, 597 bp, Cricetinae gen. sp.; identical to SEQ ID NO: 388

SEQ ID NO: 4031 - DNA, 600 bp, Mesocricetus auratus
caagaccatcatcaccaccaagagcaggtggggaggcttccgtcctcctcctcatcccatccaggtcagctgcagcctcagcagcccagagcctcttgatctcctggcactatggttcgttaccgaatgaggagccccagtgagcgtccgcaccaggggcctgggcaagaacatggacgtgaagagcaagggcaggggcaagggttgagcccagagcgtgtggaggactatgggaggacacacaggggccaacaccaccacagacgtcgctgctcgcgtaggaagctgtaccgaatccacaggaggcgccggtcatgcaggaggcggaggagacactcctgccgtcacaggagacggcatcgcagaggctgcagaagatcacscargassmssagayscmkggcmrsmkgtgtwgswgkcccmccatctaaaccctgctgcctcccaggtagcctagcaaaccagaactttccttcccaaaggctgcagaagatcacgcaggaggaggagatgcaggtgcaggaggtgtaggaggcaccaccactaagcctccccaggccgtccatcctgtttggagccaaggaaatcacccgcccaagg

SEQ ID NO: 4032 - DNA, 420 bp, Cricetulus griseus; identical to SEQ ID NO: 390

SEQ ID NO: 4033 - DNA, 600 bp, Cricetinae gen. sp.
ackcctcccactttggkaaacaggatctcagctggcttaatgacyggaggtgtggcrgtattcatygggcaacctacygaggtygtgaaagtcagactccaagcacagagccacctacacgggatcaaaccccgctacackggkacctacaatgcttayagaattatagccacaacagaaagcytktcaacactctggaaagggacracccctaayctgttgaggaatgtcatcatcaactgtacagagctggtaacatatgacctcatgaagggggcccttgtgaacaaccaaataytggcagatgacgtgccatgccayttactgtcagctyttgtcgcyggsttttgcaccacattcctggcctctccagcagatgtggtaaaaacaagattcatcaactctctaccaggacagtacccaagtgtacccagctgygcaatgaccatgytcaccaaggaaggaccaacagcttttttcaaagggttygtgccttctttcctgcgrctsgcrtcctggaatgtcatcatgtttgtgtgctttgaacagctgaagaargagytgwykaagtcgaggcagacggtggactgcaccacataa

SEQ ID NO: 4034 - DNA, 1021 bp, Cricetinae gen. sp.; identical to SEQ ID NO: 392
  misc_feature (265)..(279): n is a, c, g, or t
  misc_feature (389)..(404): n is a, c, g, or t
  misc_feature (775)..(802): n is a, c, g, or t

SEQ ID NO: 4035 - DNA, 600 bp, Cricetulus griseus
attgccagtcattgcagcgcagcaaacaccccagtggtgggcctgaagtatacgtcttgctcttcaactccacgggtgacagggactctgctgccctgctgaagttgctgcagccctgccagtttgactacgctgtcttttgccccaacctgacggaggtgtcatccacagaaaatgcagaccagcagaacttcacagtgactctggaccaggtgctgctccgctgcctccaacaccagcaacactggagctgcctgagtgagaaacaagccagccctgacttcctgagcagccccagcccagagcctggcaggccaggttccctgcagccggcactgcgcccgcctcactctacgggcactaactcccttgtctttagctgtatctcccacgccttgcagtggatcagccaaggccgggatcccatctttsaggccccaagccctccaaggagcctcctcagccaccccacggccagtagtggggcaagcattctccgggaggctggtgccatccatgtactggttactggaagcctgcacctggtgggtggagtcctaaagctgctagagccctccctgtcccagtagccaaggacca

SEQ ID NO: 4036 - DNA, 474 bp, Mesocricetus auratus; identical to SEQ ID NO: 394

SEQ ID NO: 4037 - DNA, 558 bp, Mesocricetus auratus; identical to SEQ ID NO: 395

SEQ ID NO: 4038 - DNA, 379 bp, Cricetulus griseus; identical to SEQ ID NO: 396

SEQ ID NO: 4039 - DNA, 408 bp, Cricetulus griseus; identical to SEQ ID NO: 397
  misc_feature (323)..(337): n is a, c, g, or t

SEQ ID NO: 4040 - DNA, 600 bp, Mesocricetus auratus
ccagaactccagccggtgcctatgcctcagcctcttctccttcctgcttgtggsaggggccacaatcctcttctgcctgctgaacttcggggtgatcggcccccaaagggaagagaagttccccaaccctatcatcggctccatggsccagacactcacactcagatcatcttctcaaaattcgaacgacaagcctgtggsccacgttgtagcaaaccaccaagtggaggagcagctggagtggctgagccatcgtgccaatgccctcctggccaacggcatgtctctcaaagacaaccagctggtgataccagcagacgggctgtacctggtttactcccaggttctcttcaggggccaaggctgccccagctacgtgctcctcacccacactgtcagccgcattgctgtgtcctacgaggataacgtcaacctcctgtccgccatcaagagcccctgccccaaggaaacccctgagggggaggagctcaagccctggtacgagcccatctacctgggaggggtcttccagctggagaaaggtgaccgactcagtgccgaggtcaacctgcctaaatacttagactttgcagaatccgg

SEQ ID NO: 4041 - DNA, 571 bp, Cricetinae gen. sp.; identical to SEQ ID NO: 399

SEQ ID NO: 4042 - DNA, 600 bp, Cricetulus longicaudatus
gctggaacctacccagcctgtctgctttctaggaatctctaggtctctgcttagagaatggccttctaggaacttccttgggccttcgtgatcctggtaagacctgggttagaggactaggccacatccataaacatttgggtatcttgcctcagtgcataccagcaggtggcctcataagccatgagacttggacaccagggtgctgctcacagattagggaagaggccatcctcaagcagttccctgtgccactggaaagaaaactaggaaagtggccttttcctgtatttatcggatggcccttgctctgatggcctatccttgctgaagcagaaagtgcagagattccccagttggctacagccttgtcccacctctgccacttctctcccatactctttctaatgacctctcagttctgaaaggatttgggagggatccagtagtaaaacctaggtggctaaatcccttgcatttcagggcagacatggactatgtccccatagtcattccccaaatcccataggctggtatcaactctggaaatccataggtcctttcccagtttgttgagcaaataagtacagaaccagaatg

SEQ ID NO: 4043 - DNA, 600 bp, Cricetinae gen. sp.
gagcagatggtagactcragcaaacctgagctgctctatcgaacagacttttttcctggccttggctggctgctgwtggctgagctgtggrcagagctggagcccaagtggcccaaggccttctgggaygactggatgcgyagacctgagcagcggaaggggygggcctgtattcgtccagaaatttcwagaacgatgacctttggccgyaaggrtgtgagccatgggcagttctttgaycagcatcttaagttcatcaagctgaaccagcrgttcgtgtctttcacccagttggayttgtcrtacytgcagcgggaggcttatgaccgggatttccttgcccgtgtctatrgtgccccsctgctacaggtggagaaagtgaggaccaaygatcagaaggagctgggggaggtgcgggtacagtacackagcagagacagcttcaaggcctttgctarggccctgggtgtcatggatgacctcaagtctggtgtccccagagctggytaccggggcrttgtcactttccagttcmggggycgrcgtgtccacctggcacccccacrwwcctgggaaggctatgatcctagctggamttag

SEQ ID NO: 4044 - DNA, 600 bp, Cricetulus longicaudatus
agcaacccaacgcccgctgtgcaccgggacatggctgccaggacatcgccactaaggcccatagtcgccaccactgggcctacccttagccccgtgccacctgtggtccacctgaccctccgccgggctggggatgacttctcccgtcgctaccgtcgcgacttcgcggagatgtccagtcagctgcacctgacgcccttcaccgcgaggggacgctttgctacggtggtggaggaactcttcagggatggggtgaactgggggaggattgtggccttctttgagttcggtggggtcatgtgtgtggagagcgtcaacagggagatgtcacccctggtggacaacatcgccctgtggatgaccgagtacctgaaccggcatctgcacacctggatccaggataacggaggctgggacgcatttgtggaactgtacggccccagtgtgaggcctctgtttgatttctcttggctgtctctgaagaccctgctcarcctggccctggtcggggcctgcatcactctgggtacctacctgggccacaagtgaggtccacagacctgctccccaaaatatgcaaaaggttcactaaagcagtag

SEQ ID NO: 4045 - DNA, 310 bp, Cricetinae gen. sp.; identical to SEQ ID NO: 403

SEQ ID NO: 4046 - DNA, 257 bp, Mesocricetus auratus; identical to SEQ ID NO: 404

SEQ ID NO: 4047 - DNA, 600 bp, Cricetinae gen. sp.
gaggtggtgaccytgtggtaccgagcacctgaaatccttctaggctgcaagtactactccacagccgtggatatctggagyctgggctgcatcttcgctgaaatgcacctagtgtgtacccagcaccatgctaagtgctgtggggaacacagaagaaatggaagacacagtctctgcccgctgtgctcctatctagaagtggctgcgtcacaaggaggggggatgaccgcagtgtctaccccataccccgtgacccggcgggccctgtttccyggagattctgagatygaycaactcttccggatcttycgractctggggaccccwgatgaggtggtttggccrggagtyacttctatgcctgattataagccgagtttcccsaagtgggctcggcaagattttagcaaagttgtgcctccactggatgaagatggrcggagcytgttatcgcaaatgctgcactatgaccccaacaagcggatttcagccaaagcagccctggcccaccctttcttccaggatgtgactaagccagtaccccaccttcggctgtgatgtccttcccaaagccctcctcacccttgggtcttgacttga

SEQ ID NO: 4048 - DNA, 1398 bp, Cricetinae gen. sp.
aagcctggtgatgtcatccactatgtgttggacagacgccggacgctaaatatttcccatgatctgcacagcctcctgcctgaagtttcaccaatgaaaaaccgcaggtttaagacctgtgctgttgtyggraaytcyggyattctactagacagtgratgtggcaaggagattgacagtcacaattttgtaatcaggtgyaatctagctcctgtggtggagtttgctgcggatgtggggactaaatcagattttattaccatgaacccatcagttgtgcaragagcatttggaggctttcggaatgagagtgacagagmaaartttgtgcatagactttccatgctgaatgacagtgtcctttggatccccgctttcatggtcaaaggaggagagaarcacgtggaatgggttaatgcattaatccttaagaayaagctgaaagtgcgaactgcctatccatcaytgagacttattcatgctgtcagaggttactggctgaccaacaargtgcccatcaaaagacccagcacaggcctyctcatgtacacactggccaccagattytgtgatgaaattcacctgtatgggttctggcccttccctaaggatttgaatggaaaagcygtsaaataycattactacgatgacttraaatatagatacttttccaacgcaagccctcacagaatgccrttagaattyaaaacmctgaatgtgctacacaacagaggagcrctaaarctgaccacaggkaagtgcatgaagcaataaagcacatattgaaggatcaaaactggatagaaactttttctaaagatgcttctggagatttagaaacaggatccaaaacaaggctggggttcagcatccacactgactgaatagctgaaatggaagtccatgggaatccaccaccagctgatgaaatacctgccaagtgctctaactataaaatattctgacttcaagggtcctagtaagtgccacttccacgaagaatacagtttgaatgtattatcagtagtgtttacaagatccaacagtgcactcatcattaattagcaaagcaaatatgttcgtcactgtggggcagccgctgtaatgccaagcacactggaagaggaactcaggagcatcacgactcggagcttgggaaattaacatccttatccgcagaaatgaagaagaaaaagaattcaaacagtgaaatccatgagatgaagtaacttgaaggaatgtcttcagtcaggacactgagagtgatcatgtgtgtgttttgcttgtgtttttgtttgtcttctgaaacttgttttcttttgggtatggggtgaatagaaattcatctgaggtacagaaatgggaaatacatgacagagaaaaataaacatcaaacag

SEQ ID NO: 4049 - DNA, 477 bp, Mesocricetus auratus; identical to SEQ ID NO: 407

SEQ ID NO: 4050 - DNA, 600 bp, Cricetinae gen. sp.
cccatcctctagcacatttcccctcgttactcgttgctagatgttcactgtccccagggttgtctacaaccgcagctctgggcaygtgtccaatgctcctggtgtacagatccgygtccctggctttggcaagayctaytctgttgagtacttagaygacaacaagctagcaggtgtgtctactcagggaaaggaaggggctcttggcatcatgctggccatacaagtatgatggacagagattcctatatggctgcctccacaggctacatgcacacactggtacagaatctggttaacaatgggtatgtgccggatgagacagtgcgggccgcaccctatgactggcgtctggaacccagtgagtgtttacaggtggtgggctgggggcatgacaggtggtcccagactctcattgcttctgacctatctcgcccatctccagggcagcaggatgaatactaccggaagctdgcaggactggtagaggagatgtatgcygcytatgggaagcctgtcttccttrttgggcacagccttggctgcytacatgtgctctacttctkactgcgtcacgctcagtcctggaagcacacattc

SEQ ID NO: 4051 - DNA, 471 bp, Cricetinae gen. sp.; identical to SEQ ID NO: 409

SEQ ID NO: 4052 - DNA, 561 bp, Cricetinae gen. sp.
  misc_feature (35)..(53): n is a, c, g, or t
aaaaaatgagacaacattggcatggctttgttttnnnnnnnnnnnnnnnnnnnggttttttaaaattttttttaaaaaaggttttgttttggcgcttttgactcaggatttaaaaactggaacggtgaaggcgacagcagtcttggagcaagcatcccccaaagttttacaatgtggctgaggactttgattgtacatttttttttcttttttaagtcattccaagtacccatgagatggctacaggaagtccctcaccctcccaaaagccaccccaattccctagaggaggatggctgagtccatgccctgagtccacactggggaggtgacagcattgcttctgtgtaaattatgtactgcgaaaattttttttaaatcttccgccttaatacttttttagttttgtttttatttttgaatggtcagccatcgtgaccctcatgggtgtttttttttgtccccccaacttgagtatgaaggctttggtctcccctgggagtgggttgaggtgttgaggcagccagaggggcttgcctgtacactgacttgagaccagtt

SEQ ID NO: 4053 - DNA, 283 bp, Cricetinae gen. sp.; identical to SEQ ID NO: 411

SEQ ID NO: 4054 - DNA, 600 bp, Cricetinae gen. sp.
aaggcctttctgctcagtggggtggatgarctggagcakagaagggatgaaataatyrgctaystctgygacctwgcccctgagcccmgagcccctactaagcstccycaggyagcwcraatcaccacargyccagggacyttkgsrrtktcatcrcctggacccaagaggaagtccatggttctggaygtggtgtttgtcctggaggggtcbgayraagtkggygaagcyarcttcaataagagcaaggarttcctggaggaggtratwcrgcrcatggatgtsmgycaggatggyayccacatytcvgtgctgcagtattcatacayggyaactrtggagtacaccttcarkgargcccagtccaaggaggatgtgttgcggcatgtgcgwgagatccgttaccacggtggcracagraccaacactgggcaggccctgcagtacctytcygagyayagyttctctcccagccagggggaccgggmmcaggcacctaatctggtctacwtggtcacagggaaccctgcctcsgatgagatcargaggttgcctggagacatccaggtggtaccyattggrgtgggcccccrtgccaac

SEQ ID NO: 4055 - DNA, 1400 bp, Cricetinae gen. sp.
  misc_feature (1340)..(1358): n is a, c, g, or t
tcgccattcaagtaccagagcctgctgaccaagaataaggcccgaatggtcatcctaatggtgtggattgtatccggccttacctccttcttgcccatycagatgcactggtaccgtgccacccacmagaaagccatcrmctgctatcwcaaggagacttgctgygacttcttcacgaaccaggcctaygccattgcttcctccattgtrtctttctacgtgcctctagtggtcatggtctttgtctattccagggtcttccaggtggccaaaaggcarctccagaagatagacaaatctgagggaagattccaytcccmaaacctcrgccaggtggagcaggatgggcggagtgggcacggactccgaaggtcctccaagttctgcttgaaggagcacaaagccctcaagactttaggcatcatcatgggcacattcaccctctgctggctgcccttcttcattgtcaacatcgtgcaygtgatccaggamaacctcatccctaaggaagtttacatcctccttaactggttgggctatgtcaattctgctttcaatcccctsatctactgtcggagtccagatttcaggattgccttccaggagcttctatgcctccgcaggtcttcttcaaaagcctatgggaacggctactccagcaacagtaatggcaaaacagactacatgggggaggcgagtggatgtcagctggggcaggaaaaagaaagtgaacggctgtgtgaggaccccccaggcacggaaagctttgtgaactgtcaaggtactgtgcctagccttagccttgattcccaagggaggaactgtagtacaaatgactcaccgctgtaatgcaggctttctgctttttaagacccctccctgacaggacactaaccagactatttaacttgagtgtaataactttagaataaaactgtatagagatttgcagaaggggagcatccttctgcccttttttattttatttttttaagccgcaaaaatagagagggagagaaactgtacttgagtgcttgtttgtttcttgtgcaattcagttcctctttgcgtggaacttaaaagtttctgtctgaagtatgttgggttctagaggactgtctgtatgtttagatgattttccatgcatctacctcactcgtcaagtgttaggggatacgctgctagtaatttgtacctgaaggaaattttccttcctgtacccttacacttgtcaatcctgtgtcttggacctttctgctgtgaatatatactctctcccgctccacttatttgctcaaatggagtgtgtagacagggatcttgagggacagcttcagttnnnnnnnnnnnnnnnnnnnagcaaagtctaaagtttacagtaaataaattgtttgaccacg

SEQ ID NO: 4056 - DNA, 600 bp, Cricetulus griseus
  misc_feature (62)..(84): n is a, c, g, or t
  misc_feature (91)..(131): n is a, c, g, or t
aaacagcttcaagaggagggaaaacgggtagcaatggtaggagatggaatcaatgattctcnnnnnnnnnnnnnnnnnnnnnnnggaattnnnnnnnnnnnnnnnnnnnnnnnnnnnnnnnnnnnnnnnnntgtggtttttataaggaatgaccttctggatgtcgtggcaagtatcgacttgtcaaggaagacagttaagaggattcgaatcaattttctctttcccctaatttataatctggttggaattcccattgctgctggagttttcctgcccattggtttggttttccaaccctggatgggatccgcagcaatggctgcttcatctgtttctgtagtactttcttcccttttcctcaaactctacaggaaaccaacttatgacaattatgagttgcgtacccgaagccacacaggacagaggagtccttcagaaatcagcgttcacgttggaatagatgatgcctccagaaattccccgagactgggcttgctggaccgaattgtcaattacagcagagcctctataaactcactactgtctgacaaacgctccctgaacagtgttgttaatagtgaacctgacaagcactcg

SEQ ID NO: 4057 - DNA, 600 bp, Cricetinae gen. sp.
ggccttcttgggctctgtagcaggtctagtgacwggatggtcrttggctttyctggcttttgagcgctacattgtcatctgtaagccctttggcaacgtccgcttcarctccaagcaygcactgrtrgtggtcctggtcacktggrycatwggtrttggcgtgtccatcscaccyttcttyggctggagcaggttcatcccggagggcctgcagtgctcctgyggcccggactggtacacggtgggcaccaagtatcgmagcgagtmctacacctggttcctcttcctgttctgtttcatygtgcckctytccctcatctgcttctcctactcgcagttgctgaggacyctcagagctgtggcagctcagcagcaagagtcagctacgacccagaaggcrgaacgggaggtgasccwcatggtggtggtgatggtggsrtctttctgtstctgytaygtgccctaygctgccctggccatgtacatggtcaacaatygcaaccacgggctggayttrmgrctmgtcaccatccctgccttcttctccaagagctcatgtgtctacaatcccatcatctactgctwcatgaacaagcagtt

SEQ ID NO: 4058 - DNA, 264 bp, Mesocricetus auratus; identical to SEQ ID NO: 416

SEQ ID NO: 4059 - DNA, 1400 bp, Mesocricetus auratus
  misc_feature (371)..(395): n is a, c, g, or t
  misc_feature (555)..(568): n is a, c, g, or t
  misc_feature (570)..(597): n is a, c, g, or t
  misc_feature (626)..(643): n is a, c, g, or t
  misc_feature (1083)..(1111): n is a, c, g, or t
cactgtgtcaccaggggagaaggtggacatgactcctatctatgggctgactttaaagcacgcccgctgcgaatacttccaagcgcagacacggtcctctgggcctcagyatccacaagcttagactgccctgtgtggtcaccagagcagggggctgttccagggatttaacttcactcagaaacacagactctgggcttgtgcttgcctcctgatttggtcttgcttctccgcatgctgatcacagacactgggacacagcagagacccactggaacatcagagtcattcccaagttcaccagcaactaggggggcctgaaagggaaaggaggtccctgggcctcagaaaactcctgcagagastccccnnnnnnnnnnnnnnnnnnnnnnnnngaaaaatgcttagagcatggtcatgccaggatctgtcaggcttagaggagctgtccagaatagagggagaagacatcttaaaatactgccacaggcctgtccacgtttgccaggcattggtggtgcacacctttaattccagcactggggaagcagacgnnnnnnnnnnnnnntnnnnnnnnnnnnnnnnnnnnnnnnnnnncgagttccagaacagcctccaaaacaatnnnnnnnnnnnnnnnnnncaaaaaccaaaataaacatgctgccacagaagtgcttctgccatttactagggctggacagctttcccacatgggtctaggacgatgtctgtggtgatcacctttatttgtccagggtactcctgtccttgcaaaagcccccgttcctgctctggaagtgctgtgtcttgtgtctaggaagatccaagaacagagggacagactttctgggcagtaggaccaggtcaagagtaaagggatgactcttgagacaagagtcttgtgcagctcagattgcctctgagcctgctgtgtattgatcgtgaattacttacttttttaatgcttttactgacataccaagtgctaggatacagtcattggtctctcttctttactgtataaaatgttcatttaaaaaatgtttgtaccagctgggcggtggagatgcgcacctttannnnnnnnnnnnnnnnnnnnnnnnnnnnncgatttctctgagttcgagaccagcctggcctacaagaactagttctaggacaggcctccaaagccacagaaaaaccctgacttgaaaactccccccccccaccgcaaaaaataaatgtttgtacctaagaccttttattttggcccatattttgcttatgcatttgtattagtcatatcttaagagtttagatcaatgcatttactattacagagaaaaccctaactcaagtatccagaaatatataggaactacctacctgagctaaataaaatattacctggaagt

SEQ ID NO: 4060 - DNA, 600 bp, Mesocricetus auratus
cagtggcaggtcaaccatgacgaaaagcagtggaaagacccctttgtgttccgtccagagcggtttcttactgataatgacacagtcatcaacaagactctgagtgagaaggtgatgctctttggcttgggaaagcgcaggtgcattggggagatcccggccaagtgggaagtcttcctcttcttagccatcctgctgcagcagctggagttcagcgtgccaccgggcmmaaaggtggacctgacacctacctacgggctgaccatgaaacctcagacctgcaaatacatccaggcgtggccacgtttttccaaatgaagatggctgaggcaggggaggaggcatccatggggctgtcacctctgtttctttccctttctttttaaataacagcttttttttggagtacaattctttcaccaaataattcacctccaatcaaatagaatattgtctgtcatatacccccaaacctatacccattaagatttatgactattcatcctaacctgtctcccttgctccacmagatgctaatgwagtttttgactcgataaatttgcctactctagtcccatcacataaactcaatgatctatg

SEQ ID NO: 4061 - DNA, 1400 bp, Mesocricetus auratus
catygaggaccgtgtacaagaggaagcacagtgycttgtggaggaactgaggaaaaccaatggstcaccctgtgatcccacgttcatcytgrgctgtgctccmtgcaatgtgatmtgctccattattttccagaatcgttttgattatamagatmaggattttcttaccttyatgraraaastaaatgaraatgycaggattctgagctcdccctggttkcaggtctgcaataattttccttyaytaattgactactgtccaggaagtcatcayavaataacaaaaaatrtcaattatwtbaraarhtacmtttyrgagaaaatrraagaacatcaggaawcattggatrttgmaaaccctcgggacttyattgattaytacctgattaaactaaarcaggsaaacyacaatcarcaatcrgaatttwcacytgaaaatctgrcaaccactgtvagkgatctgtttgstgctgggacagagacaacragcacracgctgagrtatgctctcctgctcctgctgaagcacccacacgtcacagctaaagtccaggaagagattgatcaagtrgttggcagacaccgcaasccctgcatgcargacaggagccacatgccctacacagatgccatgattcatgaggtccagagattcatmgacctcatccccaycarcctgccccatgcggtgacctgtgacattaaattcagggactacttcatycccaagggaacaacgrtaataacwtcactgtcatcagtgytgcaygacarcaaggaattccccaacccagaggtatttgacccwggccaytttctwgataaraatggaaastttaagaaaagtgactacttyatgccyttttcrrcaggaaaacggatrtgtgcaggrgagggcctggcacgcatggarctstttctattcctgaccaccattttrcagaactttaagctgaaatctmtgrttcacccwaaggacatygatacaaccccagtrstraayggatthgcctctctgccaccctcctatcagctctgcttcattcctgtctaamgaagatwmgastttctggccyaggmtgygwttdttttytcgcaatccmctytagaccttcawtccrtcwgggacaaagtgtcctyyctmccctctcatgtattcycattcwrtsaaktcycargaaacasctgtcaaycattttgcaawwtctggartcastgcayaaatrtatttctatttkytattctttgyaacagtsttrytatyccttrtgctaatatrtatstkktcytgarmwaaamtayaamtttacyrytatatwactaatayaataagataattcattgtyatttttctkcytcatgttttcartaataaatrtatttgatttgtgtaaaaaaaa

SEQ ID NO: 4062 - DNA, 1400 bp, Cricetulus sp.
  misc_feature (197)..(204): n is a, c, g, or t
ctaagcaccaaatcagacaratggaaatgaagattytaagagttctaaacttyagtttgggtcgccctctgcctctgcacttcctccgtagarcstctaagattggagaggttgacgttgaacagcatactttggccaaatacctcatggagctcactwtgttggactatgacatggtssactttgctccttctcannnnnnnnctggagctttttgcttagcactgaaaatycttgacaayggtgaatggacaccraccctgcagcactacctgtcctayactgaagaatcccttctgcctgtcatgcagcacctggctaagaatgtagtcatggtgaaccrtggccttacaaagcacatgactatcaagaayaagtatgcaacatccaagcatgctaagatcagcactctggcacagctgaattgtacactagttcagaatttgtccaaggctgtgkcaaaggcrtaactcaagtggaccacwacactacatcgscaaatgyrattggcaccatgtgccrcctgtacatagtatmcagtgtttacttgctcttcaataaaggytgttttacttttcatagcttacctcatwtgrwwsyyggwtsytctgactctaggataacaagggttgtctaaaacatttaggattatttttgaaactgcttttagtttaacagagaatccaagtaatgtacgtaattgtagcctatatgtttatgtacttccttctttaatgtgtcctggtcatatcttttaagtcatcctgcaaagccctctgcctagctcttgtttaaactgtcaatttaccagcttgtccttagttcccttttctatttcttcaggtggttgctgtccttcactgtgtcttgagctatggactttcagatctgaaccccagttttcttgtgaattatttatttgttaattggcttgggaaatagcatgttttaaaattaaaggtataaaaagaatttgccccttaatctcaatgtcctatataaatgtaatcatgcatatgttgtcaaggagatatggactcatttttttcaacaatattccttttaatgcctatattgcatttcctaagtgtacatttcatactgtatgtaatgtattcagtgatcctttacaatacattcaaattgcattctctcattgcctctaaacaatactgctaaaatgttgttttatgccttgcttggctgtatgcatagtagctttcccagggggtatatgctttaaattctgatgaagccagatgagacttttggttgtgggcactataccaaggtgccatttcctctatctttccactgtcttatgacacttaactggcaaaaatcctgtctctgtttgttttaatttatacatctgatgtcaagttgaataaaatttatta

SEQ ID NO: 4063 - DNA, 600 bp, Cricetinae gen. sp.
ttcagcactctgtctaccttctgcagggcaagaagtcaggagggggatagggattggtctgttcaccataattcacaaggcaaggtgaaagacactggaatctttcttttagtaattttgttttctggtgctaacgactgaacacaggacctcgccctcactaagcaaatgcaccacccgtatgccagattttctagctcctctttttggcgttttagctcttcagtttgtcagaggtccctgttgccatcttcttcctctgagagtcacccctgactccatagtggaagtgaagctttagatgtcactttgaaaggctttgacctggtcaggtcatcgggggacattttctataaaagagttaacaattatatttatatttcaagttatagtagtttggatattttagtgttttgatttttgtttttttggggggcggggcagtgtggatggatttgttgccatgtgcactttggaattttgtaatgcaattgttgaaagaaaatatttcttttatgatcttctccctctaccccttgtcctccagtgttctgttaatatttatttgtaatttagtttgtaattcattaaaagaaatta

SEQ ID NO: 4064 - DNA, 983 bp, Cricetinae gen. sp.; identical to SEQ ID NO: 422
  misc_feature (80)..(104): n is a, c, g, or t

SEQ ID NO: 4065 - DNA, 1244 bp, Cricetulus griseus; identical to SEQ ID NO: 423

SEQ ID NO: 4066 - DNA, 1354 bp, Mesocricetus auratus; identical to SEQ ID NO: 424

SEQ ID NO: 4067 - DNA, 600 bp, Cricetinae gen. sp.
gatycagagatttgctaaycttgctccctkkggcattcctcggaagactatcmagaayaccacattccgtggcttcttcctccccaaggacacygamgtgtwcccyatactaggttctctgctgackgacccaaagttcttcmccagtcccaaasatttcaacccccagaacttcctggatgacarrgggcagytgaagaagawtgctgcttttgtgcccttytcygtaggaaagcggttctgtytgggggacggcctsgcyaggatggagctctttctcttcytcaccacyatcttgcagaacttccgsttmaagttcccaaagaagctggaagacatcgacgcgtcccccaaaccgttrggrtttkccaggatcataccacrttacaccatgagcttcctgcccatctgattcyggrrycaaccaaggtggagcaarakggrggkrgagtctggagtgagrccagagrcagagygaagggagaaggtgaaaaytggggtttcagaagggaccacatgsctggaagaaaatttayryrccyrcttaaattgkgaygctaatwaaacraatarcrykcagtggacagtggtcaaaaaaaa

SEQ ID NO: 4068 - DNA, 1400 bp, Cricetulus griseus
ctactckccracctctccatcctactcsccaacctctccwwsctactcmccracctctccatcctactccccracytctcccagctactccccracmtctccyagctactcmccracatcaccyagctactccccracttctcccagctactccccracatcwccyagctactcaccmacmtctcccagctactccccmacytcmccaagytaytctcccacctcccccagttactcaccgacwtcyccmagctaytctcctacatctccaagctactcgccaacttctccaagttattcwcccaccagccctaactattctccaactagtcccaattayacsccaacatcmcccagctacagcccaacatcacctagytactcrcctactagtccaaactacacaccaaccagyccyaactayagcccaacctckccaagytattccccaacttcacccagytactccccsacctcgccaagctaytcmccctccagcccacgstacacaccacartctcccacctacacmccmagctctccmagctacagccccagctcwccaagctacagccccacytcacccaagtataccccaactagtccttcytacagtcccagctcwccagagtataccccaacctctcccaaatactcacctacaagccctaaatattcacctacwtctcccaagtattctcctaccagycccacytactcacctaccacmccaaaatactcgccaacctctcctacatactcrccaacctctccagtctacaccccaacctcccccaagtactcrcccaccagccccacctactcccccacctcycccaagtactcrcccaccagccccacctactcccccacctcccccaagggctccacttactcyccyacytcccctggytactcwccyactagccccacctacagcctcaccagcccagccatcagccckgaygacagtgatgaggaraactragggygagcagggcgcagcagcagcaggttagggtcrgacagcctyagtggcctgtgcagtcacttcccttgrgctgtgaccctrgcctggrccccttgtacataactccttgtgacagaaccctcyggaggttctagatcccatttttgatgggcttttygtcttgycctrcactcrtgctktctkkskwsksactsacagctgcaggrytttrttaccccacctgttccrtgcctgactccacagtgaaggtctttgcttgcctgtgacttgattgggattmaaggcattttmacytctgaaggctmrttcctgctttgggtcayacaaatgacctctggaagaacaaagcttaagctgccttttgtctgttatttttttgaaatttaaataaagtttactmattttgacc

SEQ ID NO: 4069 - DNA, 600 bp, Cricetulus sp.
agtgctaataactatttgccagtagctgatttgtttatgtggatcacgtctcacagagtttattggaatgtttgatcatgttttctcagaactgtttttgctgtagttgagtttgcccatatttatgtaggctttattttattttttggatgatcattagtgttaaagaaatcaactgaaaaccatgaataatactgtaaaaagacaaaacagttaaaagcagtattcctgatttctgtctccccagtatctaatattggggtggtatttctaagaatgttgacaacattatctgaggctttcttaaggatttccacacattcatataaaaaaaatgagtttagtatttgtttctccatggcttctctataacccagtacactgaagtatcggtgactgcatatggcaactccatcagtgagctgtgatggtaggattttcctacctctgtacttttacctgtagactatttttactacggtgctttataatgtgttttaaagcattgcatttacaaaagaaaaatgctgtaaatattgcatattttatgtatttggaccaaaaagttacaagtcagtagataaaaagtggttttgcacc

SEQ ID NO: 4070 - DNA, 603 bp, Cricetinae gen. sp.; identical to SEQ ID NO: 428
  misc_feature (508)..(536): n is a, c, g, or t

SEQ ID NO: 4071 - DNA, 1400 bp, Cricetus cricetus
  misc_feature (975)..(997): n is a, c, g, or t
gtggtggctttcctggatctgaggatacsaagcttaaatttgaagagatcaccagtgttatcaacccagctctggacaagtacttcccgccagactctggagtgagagttatagccgagccaggcagatactacgttgcctcagctttcacactggcagtcaatatcatagccaagaaaatcgtatcgaagggctctgacgatgaagatgagtccagtgagcaaaccttcatgtattatgtgaatgatggagtgtatgggtcatttaactgcattctttacgatcatgcacatgtgaagcccctgctgccgaagagacccaagccagatgagaagtattactcatccagcatctggggaccaacatgcgatggccttgaccggattgtggagcgctgtaatctgcctgaaatgcatgtgggtgattggatgctctttgagaacatgggtgcatacactgttgctgctgcatctactttcaacgggttccagaggccttctatctactatgtgatgtcgaggccaatgtggcagcttatgaagcagatccagaaccatggcttcccaccagaagtggaagagcaggatgttggcactctgcccatctcttgtgcccaggagagcgggatggaccgtcatccagcagcctgtgcttctgctagtatcaatgtgtagatgccattcttgtagctcttaccttcaagtttagcttgaattaagggatttggggggaccatttaacttaattactgttagttttgaaatgactttgtaactacagagtagggcttggcacagatgaagtatggaaggctaggagatgggtcacacttacctgtgttcctatggaaactttgaatatttgttttatatggatttttatcacttttcagacatactaacgtgtgcccctcagccactgagcaagcatttgtagcttgtacatttggcagaatgggccaaaagctaatgttgnnnnnnnnnnnnnnnnnnnnnnntcttgaaataattgggcatcagggaatgtttgcaatgtcccttaaagaagggacacacttcctgcacaggctgctgtagtcatacgagtgagtccaaacatagcagagaaggaaaaggtggatgggacaaggctataccctctacacagcatcagtttgcctagccagtccttaaagtgtgtacttggctgtgaagttggtgaggaacgtcatctgcctagcgacctgatatcctggccacaccccagggaaggcatctaaggctttttgaaccttgcctgcagaagccttgaatgttcctcaacccttgacttcgcctgcatcaccacctagtaacagttggaagtatcatacagcacttggcaatcaacttcctgtaataaatctcaacagcagcaactac

SEQ ID NO: 4072 - DNA, 487 bp, Cricetinae gen. sp.; identical to SEQ ID NO: 430
  misc_feature (306)..(325): n is a, c, g, or t

SEQ ID NO: 4073 - DNA, 377 bp, Cricetinae gen. sp.; identical to SEQ ID NO: 431
  misc_feature (228)..(260): n is a, c, g, or t

SEQ ID NO: 4074 - DNA, 1400 bp, Cricetulus sp.
tgtcttttccctctacttcatgataccatttttttttaccaccttgggattgctataccataactggtacccatcacaggtgtttgtgggagataccttctgttattttgctggcatgacctttgccgtggtgggaatcttgggacacttcagcaagaccatgctactcttctttattccacaagtgttcaatttcctctactcgctgcctcagctccttcacgccatcccctgccctcgacaccgcatacccagactcaatccgaagacgggcaaactggagatgagctattccaagttcaagaccaagaacctctctttcttgggcacctttattttaaaggtagcagagcgcctccagctagtgacagttcaccgaggcgagagtgaggatggtgccttcactgaatgtaacaacatgaccctcatcaacttgctactcaaaatctttgggcccatacatgagagaaacctcacactgctcctgctgcttttgcagatcctgagcagcgctgtcaccttctccattcgataccagcttgtccgactcttctatgatgtctgagttccctgaagactgactgcccatagcctccgttggacctcacccaggaccaacctgtctggtccaagactgccttctggtccaggcctctccaactgttggttttttcagttttgttttcagcttctcccatcacctgtaatgattattggcctggaccttattggactttaaagtccattagttgcactttgcccctggctttcttcagcttgctactcttyccctttctgtcccatctgcagcaccataagggggatgtagcagctcttatgcaaatacagctcaactttcagagccctgcatttgctggaccttgagagagaacctgggctatgtgctagagttagggccctatactccaaggtaacctcacatttgactttaaaattaagtgttctgattaggaagatcagaggcagggmtgacatttcagtttgcctcaaatktkactrarggwttggtctttttgcgttccactctaccttgtagcagtagtatgaattcacatgatcccgtaacatgtcaacagtagtcatacagtacatggccttgcaattacttttcaatgcaactttatgataattttttctaactgcttctttatatagaaaatacattatttccttcaggcaggtaaaataactttccaaaaagaaaatactgagaaacaacaaataaaaatatttataccaaacacaaaatgttggattcaagtctaatgagtcctttgcataagaacaaacaatgtgttgtactgtttttttttttaataataagtagacattcagacaggaagataactttaaagttaaaaaaattaatgactttctcc

SEQ ID NO: 4075 - DNA, 600 bp, Cricetinae gen. sp.
  misc_feature (352)..(369): n is a, c, g, or t
gccgcctgcaggatgagattcagaacatgaaggaagagatggctcgtcaccttcgtgaataccaagacctgctcaatgtyaagatggctcttgacattgagatwgccacctacaggaagctrctggaaggcgaggagagcaggatttctctgcctcttcccaacttttcttcmctgaacctgagagaractaatctggagtcactccctctggttgacacccactcaaaaagaacactcctgattaagacrgtggaaacyagrgatggacaggtgatcaatgaaacctctcagcatcaygatgaccttgaataaaaattgcacayactcygtgcaacaacgcagtaccagcnnnnnnnnnnnnnnnnnnttygtatcttaaggaaacagctttcaagtgcctttactgcagtttttcaggagcgcaagwwasatttgggatagaaataagctctagtttctaacaactgacaccctaaaagatttagaaaaggtttacaacacaatctagtttacgaagaaatcttgtgctagaatacttttcaaagtattttgaataccattaaacgctttcccagtatacgaccaactgacgcttata

SEQ ID NO: 4076 - DNA, 600 bp, Cricetulus sp.
tcttgtggagcaggctctcagatacaattagaaagaagttggttacactatagtagacaagccactactgcaccagtagactaatattgtarcattcgrggcctaccactaggtaagtccattaatgacttttctcccccagtgatatgcatagcaccttctgtcactgtgaaagctatccagtaagggggaagtttacaagtcaactccagatttaattctctatgtcctgcaaccacaatgtcttttgcctttaccatctagctgtggtgaccatccaagagcaatggcaataacctgtgttgtttgggaaacctctataaccaattgctcctaaggaggtagcccataccttgcactgagattttcatttaatgacctatgtcttcatttaataaccattgcccaccagtgtgcagggtactgcaattcagacttttttttttttagttataattaccttacaaagtagtggaatgctttgttttctcatacaggctcagatttagttaacccatagatacaaaagactatagatacagtcttttgaatgtgagtagtcaattcaaattcataatattctagatttggatccgtcga

SEQ ID NO: 4077 - DNA, 600 bp, Cricetinae gen. sp.
  misc_feature (491)..(519): n is a, c, g, or t
ctttgaatacagactcaactgagacgtcgtgttcggttgaatgacagactgaatgatggtttgtttgtttgtttagtgtccttccgcagaaagaagccttggctttcgttccctgatggaatttggagttcagcgggccaccaagggtccctgccagtgctgccaggtgctgagaccctcggtggaaagaagccggttcagtgtctgtggctctgcactggtcgtgcccagtgtggattcccttggtggttgttcctgggctccatggccttgagggttgcacgcagggggaggcgtcgggtcgggtgcggagcaatatccagcctcgaccccagcaggcttgcgggcaccctctgagccgggtccttgccctcctattgctccccgagtttgtcctccagctcccggtgtatttcatggaggagcgacggctgttttgtaaccttccttgtgctgagtgcactttcttaggtgggcttgtcgggagaccnnnnnnnnnnnnnnnnnnnnnnnnnnnnngagatggatggaagcgtggatggatggttggttggatggatggttggttggatggatgggtgtgtgggtggatggatggat

SEQ ID NO: 4078 - DNA, 1400 bp, Cricetinae gen. sp.
  misc_feature (635)..(654): n is a, c, g, or t
aataagtagaaaatatgaatacttgtttggggttatgcttgaaacttacttttaaagaaacaattgtatagaagttggttgccagtgagtaataaaagatttaagtgtttgaagaagtagcaagagccgttttaaaagaatattacaattacttcccagaaatatgtggaacactgaaatagtcctctgtgtaagatgctccacatggggcttacagcatccttttgttttcctgaaagtgagctgtatgctaaatgttcatatgtggtgtttccttcaggatcsrgggaccgagtggctacaatgttgtcacgacttttccgtatgcatggcctctttgtggcctcccatccctgggaagttattgtggggacggtgacacttaccatctgtatgatgtccatgaacatgttcactggcaacaacaagatctgtggttggaattacgagtgcccaaaatttgaggaggttagtgagattcatttgattctgactaaagtaaattacattgcaatttctaaagaatgtctgctttttagagaacatataagctaagaattctgagtgaagtcttagctggtgggcttacctcagattctcagctattcacatggtatggattgcatttaaaaatnnnnnnnnnnnnnnnnnnnnactagttagagtgggtggctctgggaaatacaccttttgtaaggactatcaggggaaaatgactgaagaattacagattgcttaataattgtattcaatttttttatttctgtgttggctattttgatttggttgtactatgctggcatttatattcttgtggtaacatgtaaaccaatgatacagaataaaagtcttgcttttgagaacttctttgaaagtgctctctctgccaataggatgtattgagcagtgacatcatcatcctcaccataacacggtgcatcgccatcctgtacatttacttccagttccagaacttacgtcagcttgggtcgaagtatattttaggtaatactgattttcccctttgcatgctgtctgatttgctgtgggaatttctaattacataatgccgttaaaagtgttgggacgttcagtagttaccagattctccttagtaaatattctcaaatctaaagcctcagtaacatggaggaaagtgaaattgttcttatcagaacagtgtatgagtctaaatgttggcctttgtgcaataaagagttctgagtgttgaattttgccattttaggtattgctggcctgttcacaattttctcaagttttgtctttagtacagtcgtcattcacttcttagacaaagaactgacgggcttaaagtaagtatttaaagctcaagtgtatgttctctaaaatacattttaagaacctttatttcctgtgtt

SEQ ID NO: 4079 - DNA, 1016 bp, Cricetulus griseus; identical to SEQ ID NO: 437

SEQ ID NO: 4080 - DNA, 600 bp, Cricetinae gen. sp.
gagtccatgatgatcttaattcagtatactatctgctccacaatggaccctgtcctcctcaaggttctgtgaggtccttcaaataccaagaaggcatgttgcagctttgcggttccatggactgtctcactaagcctgaagtgaaagaagctgaaagacaaataaccatcttctcaagaagccaggtatatgacccatgactccatcaagcaacaactcaaagcagtacctctctctaaacaagttcttccccttccctgtagtctgtcacaccttgttctggctgaggaatacaagcatcacagattcttaatcatctcctttgtcaattcttgtatgtggaattgtgtggttattattatatcattattatctaatttatattattcattattcattcaagactaaagaaaaagtgtccctccaagagtcaaaagccatctaacaaaaactcaaacaccaagcacaaggaagaccctctttttaattgtttgtcagagttgtccaagaaactctcaagacattataggctattgctattgccattggttgttccagcaggggtagaaattaagtcactaatgctgaagatatgaattc

SEQ ID NO: 4081 - DNA, 1400 bp, Cricetulus sp.
  misc_feature (34)..(61): n is a, c, g, or t
  misc_feature (1340)..(1375): n is a, c, g, or t
ggcaaaggatatgggaaagaagtgtagggatttnnnnnnnnnnnnnnnnnnnnnnnnnnnncttagcttttaacagtgtcatgaagattatawtrwrwgcctyawgttkwarttttagaactctttagagagccttaacttttaaaatcattctgctgaattcatctattwkwaatgttttaaaaggaaaaataacaactaacttgcttgaggtaactctaaccttaatcttgttttgttgttgtttgtaatgctttgtcagagattgttactggaacatttatggataaaaatactagttaaaagttggaggtttataaaatactgactaaagtatttttctagcatcatagttgcctckagtaggtgcctgctargtatatmtttaasaaatttaaagcatgaaattctggaaacatcttggctgttatagccacagtctgtctgtctgtcatctgctggrgacttctcaratgcttactgcaagcctagtgctasaatgttgtcactaaattgctaccttgctcctcttcagagacattgagtggttacaggtcattgccatttttgaaatctactgcaaaaaagttagtattaaaatctacaaaacttttaacacagtctgatttaatatagacaggtatttcaggcatctgctaaattcaktttarttttccaaaaccctasttatggtatgaaamtcttgyaatctttgagtatgtgtgggttttggggggcctggtggttctgakgattgaacccagggccacaagcatgctaagcacatgctgtaccactgagccacatcccaccagcaccctggaatcctccttaaccccgagacctttgctctttgatttttgatagttccatttatatcctagtttagagctgtatgcgagatatcagtatggactaaatgtgtgtgctagttttgttttttacattgtttttcagtatttgcaaaaccaagagggccagagtttggccccggggaagccaataaagataaaatagggagggagtttgctgagttcacttgatttcagtaagtacccacctccctgccacatacaccaaggcttaaagagaaacttatatcatgcttagaattattggacatagccttacctctacaaaccttagctttcgtgacccttttcacttacctgaaatatagaaaatgggttcaatgtaaggataggaggaaggatgggcaggattggaattgtagtattttttaaaaccaatatcttctaaatagagacagaaaagatatatgacactaaattgtactcaatgcatctaaaataccattgtaattgacggggtgaaaatannnnnnnnnnnnnnnnnnnnnnnnnnnnnnnnnnnnaataaaacatttattttatttttag

SEQ ID NO: 4082 - DNA, 1400 bp, Cricetinae gen. sp.
  misc_feature (94)..(95): n is a, c, g, or t
  misc_feature (944)..(962): n is a, c, g, or t
  misc_feature (1203)..(1219): n is a, c, g, or t
tcacttcacattgtggggaaktctactttagatrtcaacttgtttttgcacatgtttcctctagtttctctgttcagagccccaggcgactttnnttctggggtaaggcaagtcagttgactggggtccytcacctcgcttcccyaatctacattygggcracmgcatcggggtcacttaagactttctgtttttgtttttaacctagaagaaccaaatcckgatgccaaaacgtargcttagyttgtgtgttgtctctaagtttgtcgctcatgcgtgcaacagggtatagactattctgtatggtgccccatttttttggtgattcataagtaggctggctagtccaggacgccatggggtagccacctcctgaccagtcatgcctgtgtgcataaactcagggccatgaccgtggcctgggccactgtgacatcagaagagcctgtgtgagaacttaactcctatagcacagtctagggatggaggggaagaagactgtggggtgggggaggggtggcaaggatgcccaagactctcctgcctttggtaccatctctggtcacctttctcccggaagttgacaagacacatcttgagtacagctggcgctggctcctccaagaaccaagttcaccttcagctcctgcggccctgccccaggctggagtcagaaatgcttcccaaagactgagagtcttttgcttttggcaaaacgctacttaatccaatgggttctgtacagtagattttgcagatgtaataaaccttaatataaaggagtcctatgaactctactgctttcgtttcttctctgggctggtggtgtagatatagccagccttctctcaaaccctggtagctcagggaagcttggctcaaggctgcgtgcctccaattgtattctctgaggggtaggatcctgggtccaggattcctcttannnnnnnnnnnnnnnnnnntgttttcttttggccaaacttcttttgaaagttggtaggatcagccaaggttttacagggcctgatgtctgctcttgtaaataagtggtataagtaactgggactctagcataacttgacctggggccaccagagtcacacttggtttgcagagcagacacctgggacagcgttcctcccgtgtgtttgccgggacacttttccgaggactccttgcttatttagcacaacaatgttccannnnnnnnnnnnnnnnnccgttggcccagctagacaagagacctgtgccccgtgttccatcccagaacttgttgccagcatataatggctggcggggggtggggtgggggtggggtcagatctgagacagcttgtgagaccctcaggctgggcccattcgtgtaattgcaataaatggtacgtgtccatttggacagc

SEQ ID NO: 4083 - DNA, 761 bp, Cricetinae gen. sp.; identical to SEQ ID NO: 441

SEQ ID NO: 4084 - DNA, 1400 bp, Mesocricetus auratus
  misc_feature (78)..(95): n is a, c, g, or t
  misc_feature (249)..(266): n is a, c, g, or t
  misc_feature (645)..(659): n is a, c, g, or t
tcccccctggttcctccatgcaaaccaccgaggctatatcaggctcagctaacactccaatccacaatggctccttgnnnnnnnnnnnnnnnnnngcactggtccccactaccagtgcagcccacagtggtgcctcagctatgactaatagctctgaatcagacttggctaccactccaattgacagtggcacctctatctctactaccaaggcccctgccaccaccccagtccacaatggctccttgnnnnnnnnnnnnnnnnnngtgttgggctcagccaccactctgatccataatgacacctctacaatggctactacaactccagttggcaatggtacccaatcttcagtcccaagccggcaccctgtgactcccacccctcctgccgtctccagcaacagcaccattgccctaagcacttactatagcacggccctctcccctgccttctccagccatgctgcaccgcaggtgtctgttggagtctctttcttcttgttgtcttttcacatttggaaccaccagtttaattcttccctggaagatcccagctccaactactatcaagaactgaagaggaacgtctctggattgtttctgcaggtttttagccgagctttcctggggatctctaccatcnnnnnnnnnnnnnnntccgtggtcgtagactcgactgtgattttccgggagggtgctgtcaatgcctctgaggtgaagtcacagcttttacagcatgagcaggaggcagaagagtataatctggccatttcaaaaatcaacgtgggtgagatgcagtttccttcctctgcccagtcttggcctggggtaccaggctggggcattgccctgttggtgctggtctgtattttggttgctttggccatcgtctatctcattgcattggcggtgtgtcagtgccgccggaagaactatgggcagctggacatcttccccayccaggactcctaccatcctatgagtgaataccccacctaccacactcatggacgctatgtgccccctggcagtaccaaacgtagcccctacgaggaggtctcggcaggcaatggcagcagcctctcttacaccaacccagtagtggcaaccacttckgccaacttgtagggcaagccacccgcgcagggcagctgtgtagtctgccctcagtcttcactgccagccccccccccccctgcactctgatctgggctggtgagccagagttctgataggctgttcccagccttcctgacacgcgcctggtgaagcccagccctgccctgggggacaccctggggcaggggttcagtggtgactctcaggaggactgacctagaaaggctggggacggagatgggaacccaagcctggctgaataaaagctggcctcctgtt

SEQ ID NO: 4085 - DNA, 600 bp, Cricetulus griseus
gtaaatacatggcttgctgcctgctgtaccgtggggatgtggttcccaaagatgtcaatgctgccattgccaccatcaagaccaagcgcagcatccagtttgtggactggtgtcccactggcttcaaggttggcattaattaccagcctcccactgtggtacctggtggagacctggctaaggtccagagagctgtgtgcatgctgagcaacaccacagccatcgctgaggcctgggctcgcctagatcacaagtttgatctgatgtatgccaagcgtgcctttgtgcactggtacgtgggtgagggcatggaggagggggagttctctgaggcccgtgaggacatggctgccctagagaaggattatgaggaggtgggtgtggattctgttgaaggagagggtgaggaagaaggagaagaatactaatctattctttctgcccctggatcatgtcaaactcctagaacttcagcttcaacattagctgataggcattgattcctctaattgtgtcatcttcattctgtgatcatgtatttgtctgtggccctgtatggtctttccatgatgtctcaaagtaaaaagctttaagacactt

SEQ ID NO: 4086 - DNA, 594 bp, Cricetinae gen. sp.
  misc_feature (121)..(138): n is a, c, g, or t
agtctccagctaataagtcacattgagcagtttttggataccaacgaaacgctgtattttatgaagagtatggagtgcatcaaagctttccgggaggaggccatccagttttcagaagagnnnnnnnnnnnnnnnnnnctggaagcccttcgagagaaagtggaaattaassaattaaatcatttctgggaaattgttgttcaggatggagttactytgatyaccaaggatgaaggcyctggaagctctgtcacaactgaggaagccacaaagttyctggctcccaaagacaaagcaaaagaagatkcagcaggacttgaagaaggtggcgatgtggatgatttactggayatgatatagacyrtggatgtgttgggaatcyaagcatgccatctccgttgctgagagctcagaaagagcatcctggaagccattcagggggacctgaagccctggtgatcattccagcagacagctcaggagcgaatcactccaagtctctacagaatgaccacatccacatatattacaaggggtaacttagaccctatccaaatttataaagactcactattttttgattgaaaaaaaaaa

SEQ ID NO: 4087 - DNA, 600 bp, Mesocricetus auratus
  misc_feature (430)..(463): n is a, c, g, or t
caagactgcatatataaggggctggctgtagctgcagctgaaggagttgaccggccaactgaccmtacattcacctagccaccatggacatcgccatccaccacccctggatccgccgtccctttttccctttccactcccccagccgcctctttgaccagttcttcggagagcacctgttggagtctgacctcttctcaactgccacttctctgagtcccttctacctgcggccaccttccttccttcgggcacccagctggattgacactggactctcagagrtgmgkmtsswswakgrcmswtyctssgtcaacctggatgtgaagcacttctccccggaagagctgaaagtcaaggtgctgggggacgtggttgaagtgcatggcaagcacgaagagcgccaggacgaacacggcttcatctctannnnnnnnnnnnnnnnnnnnnnnnnnnnnnnnnntgtggatcctctgaccattacttcatccctgtcatctgacggcgtcctcactgtgaatggaccaaggaaacaggcctctggccccgagcgtaccattcccatcacccgtgaagagaagcctgctgtcactgcagccc

SEQ ID NO: 4088 - DNA, 600 bp, Cricetinae gen. sp.
gccaaacactgtcgcagaccagtgatcaatgctggggatggagtcggagagcaccctactcaggccctgctggacatcttcactatccgggaagagctggggactgtcaatggcatgacgatcaccatggtaggtgacctgaagcatgggcgcacagtgcactccctggcctgcctgctcacccagtaccgtgtgagcctacgctacgtggcacctcccagcctgcgcatgccacctagcgtgtgggactttgtggcttcccggggcaccaaacaggaggagtttgagagcattgaggaggcgctgcccgacacggacgtgctctacatgactcgcatccagaaagagcgatttggctccacccargaatacgaagcttgctttggtcagttcatcctcactccccacatcatgacccgggccaagaagaagatggtggtgatgcatccgatgccccgagtcaatgagataagcgtggaggtggactcagacccccgagcagcctacttccgccaagctgagaacggcatgtacatccgcatggcgcttcttgccaccgtgctaggccgtttctaggccagcctcctgctggcctggtct

SEQ ID NO: 4089 - DNA, 250 bp, Mesocricetus auratus; identical to SEQ ID NO: 447

SEQ ID NO: 4090 - DNA, 600 bp, Mesocricetus auratus
  misc_feature (387)..(406): n is a, c, g, or t
cccacaacttcctcaaatcttcacttccgttttcccacgatacgtcacttcccattttaaaaaaactacaattcccaatacatgcaagttactccgccctaaaacctacgtcacccgccccgttcccacgccccgcgccacgtcacaaactccaccccctcattatcatattggcttcaatccaaaataaggtatattactctcatctattgtctaagtaaaaactaaattcatgaagaatattcatttttaagagcatagatttctgaattagaaaaaagttgtttttgttctgttttggataaaatcttgctacataacccaggttaaactcaaactcagggtcctcctgtctcagcctccagctgttataaaatctaaattctnnnnnnnnnnnnnnnnnnnnagtgggggcgcacacagggatggtggaccctaggtagctaacatactatgaccagccacatttgtacagtggggtcacagctgtagtatcttaaagaaaacttgtcaagggactcatggcaaaaaacaccccacaaacttcaattagttccttcgactttttgaaacagttactttgtttttctgacactttaa

SEQ ID NO: 4091 - DNA, 600 bp, Cricetulus sp.
gaggggtgaactggtgtgagagaacagccctccccaacggtggctgccaatacctgtgcctgcccgccccacagatcaatcctcactccccaaaattcacctgtgcctgccctgatggcatgctactggccaaggatatgcgaacgtgcctcacagaagtggcacctgtactgaccacccagggaacatccaccatcaggcctgagatcactgcaggagccgaaggctgcccgaagcacaaggaggatcagtcggcttccagtacttccaggcagcctgcacttagcacagtggagtcggtgacaatgtcccaccaagtccagggtgacagaaggaacgaggagcggccacagggtgtgggggtcttgtccatcaccctccccatcgcactggtcatcctccttgtctttggggccatcctgttgtggaggaactggcggctgaggaacatcaacagcataaactttgacaacccagtgtaccagaagaccacagaagatgaactccatatttgccgaagccaggacggctactcctacccctcacgacagatggtcagcctggaggatgatgtggcatgaacagctgtgagaaccttcc

SEQ ID NO: 4092 - DNA, 1374 bp, Cricetulus griseus
  misc_feature (931)..(934): n is a, c, g, or t
tgttcagcgtcagccctgtsgtsaragtggctgtggakgccaagaacccagctgacctgcccaaactggtggagggcctgaagcrgctggcaaaatctgaccctatggtgcagtgcatcattgaggagtctggggagcacatcattgctggagcaggtgagctgcacctggaaatctgcctcaaggacctggaggaggaccacgcctgcatccccatcaagaaatctgaccctgttgtctcataccgggagacagtgagcgaggagtcaaatgtgctgtgcctgtccaagtcgcccaacaagcacaaccgattgtatatgaaggcccggcccttccctgatggcctggccgaggacatcgacaagggtgaagtgtctgctcgccaggagctcaaggcacgcgcacgctatctagctgaaaagtacgaatgggatgttgctgaagcccgcaagatctggtgctttgggcctgatggcactggccccaacattcttaccgatatcaccaagggtgtgcagtacctgaatgaaatcaaggacagtgtggtggctggcttccagtgggccactaaggagggcgctctctgtgargagaacatgcgtggtgtgcgcttcgatgtccatgatgtgaccctacatgctgatgccatccaccgaggaggtggtcagatcattcccacagctcgtcgttrtctgtatgccagtgtgttgactgcacagccccgcctcatggagcctatctacctggtggagattcagtgtcctgaacaggtcgtgggtggcatctacggtgtcctgaacaggaagmktggccatgtgtttgaagagtcccakgtggctggcacccccatgtttgtagtcaaggcctatcttccagtcaacgagtcctttggttttacagctgacctgcgctccaacactggtggccaagnnnncccccagtgtgtgttcgaccactggcagattctgcccggggacccgttcgacaacagcagccgtcccagccaagtggtggctgagacccgcaagcgcaaaggtctaaaggagggcatcccagcactggacaacttcctggacaaactgtaggcaggcttgcacagccacacactgcacagtgcccacccatcagaagacaccttgagactgtccccataatgctgctctggaggtggctggggccaccctgccattgagcactaacacttgatgccgactctatttatttcggaatttccgaggcagtggagtcgccctctgcaggctggactggctggcgggccatggggtgggcaggacacagctctttatcattttcagagggaaaaatgctcagatatcaaacatctaaataaatgcattcagaggaaaaaaaaaa

SEQ ID NO: 4093 - DNA, 600 bp, Cricetulus griseus
cccagaatatgggcatcggcaagaacggagaccttccctggccaatgctcaggtactggctggattgggttagggaaaccgaggcggttcgctgaatcgggtcgagcacttggcggagacgcgcgggccaactacttagggacagtcatgaggggtaggcccgccggctgcagcccttgcccatgcccgcggtgatccccatgctgtgccagcctttgcccagaggcgctctagctgggagcaaagtccggtcactgggcagcaccaccccccggacttgcatgggtagccgctgagatggagcctgagcacacgtgacagggtccctgttaacgcagtgtttctctaactttcaggaacgaattcaagtacttccaaagaatgaccaccacctcctcagtggaaggtaatttggggttaagatgaggatttctagggtttgtatgaagcaagatttccaatgcagacgtggaagtgcgaagtctcccgtgggaatctgggaactttgcttcttggcagaaatttttgtgctgttcccagagtttattaagcatcctctttatatacaaaatatttgaaattttgttagcaagagcagtt

SEQ ID NO: 4094 - DNA, 600 bp, Cricetulus griseus
tgcattgtgatcgctcaccgcctgtccaccatccagaacgcagacttgatcgtggttattcagaatggcaaggtcaaggagcatggcacccaccagcagctgctggcacagaaaggcatctatttctccatggtccaggctggagcaaagcgcttgtaaactgtgactgtttgaaatgctaagtgtttttaatattgttgcttaaatatggcacttaaccaaagtttaaaaaggtgaacactgttgatggtaatttcatcaagatgacagtcttcagaaacttcgtaatttaattaataaaaactgaaaaaaatgtcattgatgggggcattgtgtttaattgcattatctgagacataaaagaaacttaaagaatttttaaaaataaaatgtgtaattttgtttcagtttttaatttcaaccctactttgttaaatgattataaaggttgtaaaatgtacttaaatattccataaagtgcctataaaaactaaatgttcatataattggagtcatcttgtctgttgtgtgtattaatttatatatttttccaaataggatgctgtaaataattttagctttcataaaatggattttaag

SEQ ID NO: 4095 - DNA, 600 bp, Cricetinae gen. sp.
ggaccttgccagtacctagatgagtagtttgtgggacgggcatctaacatactctgctctccaagtctacttccccaacacccacacaagtgctgggtctggggtacccaaagcctcaggaaccaatttagcactttatgggcacaattgctgcccatactggcagtaagcccttgggcctgtgacactgcgagggatgctcaagtgcattgtactgataaagggaacagactatcaggtaaagaaatgagtcacaacccctcagtgtggatctggtgggtcagcctttcagtgaggccagctaagtcagcagctttgtccagcttgatgtaggtgtccatgcgaatccgatgcaggctcagccagtctggcagcaactcagataggagcaacacatgtttctccatctcccctgtggaagtgcattgtggttaactgaagcacagtgcctggatgacttgcttaactcacttacccagcctggtgccttacacccctcaaggcttaacctgtgtgcagtggatccaagcagagcctgggccctgctctcaaacaccagggggatgaacagcaagggcaagacacatatacgccaagctt

SEQ ID NO: 4096 - DNA, 600 bp, Cricetinae gen. sp.
cagcctggagctgtggagctggcagccaaacactgtcgcagaccagtgatcaatgctggggatggagtcggagagcaccctactcaggccctgctggacatcttcactatccgggaagagctggggactgtcaatggcatgacgatcaccatggtaggtgacctgaagcatgggcgcacagtgcactccctggcctgcctgctcacccagtaccgtgtgagcctacgctacgtggcacctcccagcctgcgcatgccacctagcgtgtgggactttgtggcttcccggggcaccaaacaggaggagtttgagagcattgaggaggcgctgcccgacacggacgtgctctacatgactcgcatccagaaagagcgatttggctccacccaggaatacgaagcttgctttggtcagttcatcctcactccccacatcatgacccgggccaagaagaagatggtggtgatgcatccgatgccccgagtcaatgagataagcgtggaggtggactcagacccccgagcagcctacttccgccaagctgagaacggcatgtacatccgcatggcgcttcttgccaccgtgctaggccgtttctag

SEQ ID NO: 4097 - DNA, 1400 bp, Cricetulus sp.
tatcatttatctacggttggcaattgacacttttgctgctatcagttgttccattcatcgctgtatcaggaattgttgaaatgaagatgttggctggaaatgccaagagagataaaaaagcactggaagctgctggcaagattgcgacagaggccattgagaatattcggactgttgtgtccttgacccaggaaagaaaatttgaatcaatgtatgttgagaaattgcatgaaccttacaggaattcggtacagatggcacacatctatggcatcacttttagcatttcacaagcgtttatgtatttttcctacgctggctgttttcgatttggtgcttacctcattgtgaatggacatatgcgcttcagagatgtcattctggtgttttcagcgattgtgtttggcgcagttgctctagggcatgccagttcctttgctcctgactatgcaaaagccaagctatctgctgcacacctattcagcctgtttgagagacagcctctcatcgacagctacagtggagaagggctgtggcctgataagtttgaaggaagtgtgacatttaatgaagtcgtgttcaactatcccacccgggccaacatgccagtgcttcaggggctgagcctggaggtgaagaagggccagacgctggccctggtgggcagcagtggctgtgggaagagcacagtggtccagctgctcgagcggttctacgaccccatggccggaacagtgctcctagatggacaagaagcaaagaaactcaatatccagtggctccgagcccaacttggcattgtgtcccaagaacctgtcctgtttgactgcagcattgccgagaacatcgcttatggtgacaacagccgggttgtgtcccaggatgagatcgtgagggcagccaaagcagccaacatccaccccttcattgagacactgccccaaaaatacaaaacaagagtaggagacaaggggactcagctctcaggaggyyagaarsagaggcttgctatccgtcgcgccctcawtagwsarcytcgkrtcttgytgctrsatgwwsycacgtacarmyctskmtactgagwgttsaamaggttgtccaggaagctctggacaaagccagagaaggccgcacctgcattgtgatcgctcaccgcctgtccaccatccagaacgcagacttgatcgtggtgattcagaatggcaaggtcaaggagcatggcacccaccagcagctgctggcacagaaaggcatctatttctccatggtcaatattcaggctggtgcacagaactcatgaactcttgttacagtgtatttttaaaataaattcaaatcattttacactttgtgacatgtagaagaagtttctcattgaagccataaaatataaatctacc

SEQ ID NO: 4098 - DNA, 600 bp, Cricetinae gen. sp.
cgtgcggtagccaccctcggtcgatccccggcggtggtctcggcgacccgaggccgagaggaagcgctgttcccggattcactagcgggccggggcccgggattctctgggtgcctcggaacttttccttctgcggaagccctcggtccccagcggtcgtctcggcgtctcgaagccgagaggaggcgctgtttccggcctcactgcctgctagttcccggttccttgtagggtcagacttttgtttttcttcgacgtgtcctcccatcccgggctcctgcctccgggtccttgcccgagaggatgccggtgtgtgccgatcttttctgcatgtctacctcgctcttggtcctatcacggttatgaggtcgaccagttgttgctttgatgttcggttctctcgttgattgggacaatatttggggcacttcgccggtcccgacttccagaatttccgtgtggtctgtgaatttatcaccgctacactgtcatcatattccagttttgcaatctgctctctttgtacctgcagataggtactgacacgcttgtcttgtgagtgggtgacattagtaaaggactgctctcgggctttttctg

SEQ ID NO: 4099 - DNA, 642 bp, Mesocricetus auratus; identical to SEQ ID NO: 457

SEQ ID NO: 4100 - DNA, 600 bp, Mesocricetus auratus
  misc_feature (461)..(478): n is a, c, g, or t
ccaagggcactgacgttttccctgtactgagctctgtgctgaaggaccccaagttcttctccaaccccaacgactttaacccccagcacttcyyggatgacaagggacagtttaagaagagcaatgcttttatgcccttctccgttggaaagcgatactgttttggagaaagcctggctaagatggagctcttcatcttcttcacaaccatcatgcagaatttctgcttcaagtccccacaggcaccccaagacatagatgtgaccccacaatatttcagctttgccgcaatccctccaaaattcaccatgagcttcctgcctcgctgagcgggaactctgatgggtggagacaatgagcatgtccagaaacagggcggggctaatggggtggggccaatccgggtagggctaaaggagagcatgaaaattagagggaagtctggggcctgaagtattacnnnnnnnnnnnnnnnnnnctgagcagagtgatcaccttcctgaagacgggttcttcaaagttgggaagagaggctgggatgccttcccgtcgtatctgaacaccgatcgtaataattaaagctattgttgattgtgcaag

SEQ ID NO: 4101 - DNA, 600 bp, Cricetulus sp.
cctcgtcttggtgacttcckkctccgccatggcccgtacgaagcagaccgcccgcaagtccaccggcggcaaggccccgcgcaagcagctggccaccaaggccgcccgcaagagcgccccggccacgggcggcgtgaagaarccgcaccgctaccgacccggcaccgtgacgctgcgggagatccggcgctaccagaagtcgaccgagctgctgatccgcaagctgccgttccagcgcctggtgcgcgagatcgcgcaggacttcaagacggacctgcgcttccagagctcggccgtcatggcgctgcaggaggcgagcgaggcctacctggtgggtctgttcgaggacaccaacctgtgcgccatccacgccaagcgcgtcaccatcatgcccaaggacatccagttggcccgtcgcatccgcggggagcgcgcttgagctctctatcttctccctgtcccccacaaaggctcttttcagagccacactacaccttcccggaaagagctgtttgactttagtttcctctgctcccctgtgagttactgtgtaatgaaactttttctcatgaacaccttcctagtaaagttgcaggatcc

SEQ ID NO: 4102 - DNA, 600 bp, Cricetulus sp.
acgcaagaagtggatccactgctttgaggatgtcacggccatcatcttctgtgtcgccctcagcggctatgaccaggtgctccacgaggacgaaaccacgaaccgmatgcaygagtcyctsawgctyttygacwscatctgyaacaacaagtkkttcaymgayacstcyatcatyctsttyctcaacaagaargacmtmtttgrsgagaagatyamsargtcmccmytgaccatctgcttycctgaatacmcaggcyccaryrcctatsacagawgcwgctgsctcacatccarrsrcagtwtgaragyaaraacmrmtcasctmacaargaaatctaywsycaywtsacytgtgccacmgacacsaayaayatccagktkgtmttygaygctgtsacsgacrtcatcatygccaamaatctscggggctgyggmytstactgascyctkgcctcctgymyagcmwsctkytsactkctycmctggacycwkwgctytgmtryyactcgatgctctgtgcactgagggaaaacccagaggctggccctgggggaggaggaagcaccctctgagcatccccaccctaccccactccagagg

SEQ ID NO: 4103 - DNA, 1400 bp, Cricetinae gen. sp.
gacctgcccaattccttcgaaggaccagttaccataactattgtcaaccgtgatggtacccgctacagcaagaagggcgagtatagaacacaccaagaagacattgatgcctcaaataccacagatgatgatgtcagcagcggatcctccagtgagaagagcacctcagggggctatgttttccacacctaccttcccactatacactcaactgcagaccaggatgatccctacttcatcgggagcaccatggccaccagagaccaagactcatccatggatcccagggggaattccctcactgtgactgatggatccaaattaactgracactcaagtgggaatcaagacagtgggsywaacwcaacttctcgtcctgggaggaaaacctcgagattccagaatggctcatcgtcttggcatctctcctggcgctggctctgattcttgctgtttgcattgctgtcaacagtaggagaaggtgtggrcagaagaaaaagctggtgatcaacagtggcwrtsgammsryggwssacwggaagccaagtgagctcaacggggaggccagcaagtctcaggaaatggtgcrtkkggtgaacaaggaaccmtcagagactccwgaccagtttatgacagckgatgaracccggaatctgcagaaygtrgacatgaagattggggtgtagtgcctataccagyaayttggaaagacaccaaaatcgcaracwtgtcaatactgggagctgggacccttaacagatgcaatgtgctactgattatttttattgggggtagtttctgyryaaaattttctattcmytttkcattttgttaawagtcyrttccaatttatraaaacagcattgctttctgmaatgagggcccaaagaataytccattaagawttygaytcttccagctccttcctagaggtcttgcattcccaakggatgctatggayggcttckatcamwtgcawattcytggtccctattgaaycttttccctaamctaagtcccargtaacagycacccagccagggacttaccccagggctwmgaggkattggtctctgggaggaaatttgaatgggtccatattgcctctcmrcaagyccartccttgggyattgttttccagttgggtgggagatcaggtgtactggttacacacctttttatagactcccctttctgctggaaaattttcagatgcttctgagagatccccaaagggtgaagctatttatctgtagtaagctatttatctttgtttttgaaatatcaaaccctggaggtcctttgtgcagtatgacttttgactttttttaggttactttgtcagaagcataacagggtataagttgattcataataaacacctgtcaatcttccatctt

SEQ ID NO: 4104 - DNA, 600 bp, Mesocricetus auratus
gagaacaattgacaatatttatattccagctcttggcaattttacctatgatttttcctttaaatcaagtgtcatcacgctgaataccaacgttggactttataaccggtcagacatcgttgctcatttcctttcttcctcttcatttgtcacggatgccctgcagtacaaattagagggtacttcacgtctgactcggaaaagaggattgaagctagccacagccgactctctcactaacaaatttgtaaagggcaatcatgatagcacctttagcttaaccaagaaaaacatggaagcatcagtgaaaacaactgcaaacctccatgctcccattttaacaatgaacttcaagcaggaacttaatggaaatgccaagtcaaagcccattgtctcatcatccattgaactaaactatgacttcaattcctcaaagctgtactctactgctaaaggaggtgttgaccacaagtttagcttagaaagtctcacttcctacttttccattgagtcatccaccaaaggaaatatcaagggatctgtcctttcccaggaatattcaggaagtgttgccagtgaggccaacacatacctgaattc

SEQ ID NO: 4105 - DNA, 600 bp, Cricetinae gen. sp.
gttttgtcatataaaaagtttataaatgtttgctatctgactgacattaaataggagctatgatgagcacccctgcagggtttgttctctgttctctgcttctggcccttgtgtttgttgccagggtaacttgggctcacacaaggtaggtaatggctaatttcacatgccttcccctgatgggcctcagttcttacctctggtcatagattactttttttctactgccttttcatttttcccttatatgtactcagccctgctgaaccacaaaggcatccctggggggaggttgtatgtaggtagggctcatgttctgaaagaggttttcccccaccccctccctcccccctcccccttcctccctccctcccttctttaatgtgtatcaggagtttgcctgcatgtacttgtctgtgtaccacatgctttgccctcgagtcaaaagaggggctcagatcccctgaaattgaagttacaaatgtttgtgagccattatgtggagtctggaactcaaacccaggtcctctgcaagaagagctagtggtcttaaccagtgattcactgcaccagccccagtggaaatgtcttcctgaattc

SEQ ID NO: 4106 - DNA, 600 bp, Mesocricetus auratus
gcctgcctcccggggaagctgtgcgacccagactcagactacaaccccggagaggaatacacttgcggaagcaacttcgccatagtctatttcatcagcttttacatgctctgcgctttcctgatcatcaacctcttcgtggctgttatcatggacaattttgactacctgacccgggactggtctattctggggcctcatcacttggatgaattcaaaaggatatggtcagaatacgaccctgaagcaaagggaaggataaaacacctcgatgtggtcactcttctccgacgaatccagcctcctctggggttcggaaagttatgtccacaccgagtagcttgtaagagattagtcgccatgaacatgcctctcaacagtgacgggacagtcatgttcaacgcaaccctgtttgccttggtccgtacggctctcaagatcaagactgaagggaacttggagcaagccaacgaagagctccgtgcagtgataaagaagatctggaagaagacgagcatgaagctgctggaccaagtcgtccctccagctggtggtcagtgtggcctctgcttcctaagtccgtctcggtcgaggagctag

SEQ ID NO: 4107 - DNA, 600 bp, Cricetulus sp.
gcaacatcagccctggatacagagagtgaaaaggttgtccaggaagctctggacaaagccagagaaggccgcacctgcattgtgatcgctcaccgcctgtccaccatccagaacgcagacttgatcgtggtgattcagaatggcaaggtcaaggagcatggcacccaccagcagctgctggcacagaaaggcatctatttctccatggtcagtgtgcaggctggagcaaagcgctagtgaactgtgttaaatatttttttaatatttgtattaacacatagcatttaaccaaagttaaaaagaaagtacgtaccagaataaccagttatctatttcctgtcattatgagaagcatttagtccagtttagagttttcagagactttgtaattaaagkgacagaaatagatatatcatcaaatggaaaggaatcatttaaattgcactataaaattatacaagaattaaaagtaaatgtttcataatatatacttttatttatactttctcatttgtaactataactgatttccttgctaaacaaatcatgtgtgtatcaaaaattaatgaaatgtttgtataaagtatatatagtgaaact

SEQ ID NO: 4108 - DNA, 600 bp, Cricetulus sp.
  misc_feature (355)..(376): n is a, c, g, or t
  misc_feature (478)..(509): n is a, c, g, or t
gggcctgcagactgaccactgcaggagattaactgagtcttgcctttactctagcaaagcagatagctgacatggccaatgtgatgtatacactgcaaatacaccattgtacatagaagtgtgtcagccacacatcgccaagcatatttcacataagcaaggcctaacagctaaacagctttggagatctgagtttctgcatcagtagctgtaggttaggataaaaacacagtttaagatgtatatttttaagaaacaaacccttaagtctacaataattagacactatttatttacaaatgttttattaaaaattgcccaaatcagacaggcattgaggcacatgcctttaagnnnnnnnnnnnnnnnnnnnnnntaggcagatctctgtgcattcaggtcagcctggtctacatgatgacttctaggtcatctagggctatatagtgagaccttggcttaaaacaataatgacatnnnnnnnnnnnnnnnnnnnnnnnnnnnnnnnnaaaacccacatttttagaaagcaagaaaacacaaaaagttacctgaatccagttttaagaaatacataggtcagtctggttaaaaaaaaaa

SEQ ID NO: 4109 - DNA, 1400 bp, Cricetulus griseus
  misc_feature (774)..(806): n is a, c, g, or t
aggcggtatcccacgtgcaggaagagggacgcttgcagtctgcgggacgtgtgcagtctgcgggggcgtatgcaggtggtgggcaacctgggcggaccttttgcgctcgccccaaatccttccctctataaaggcagcgctctgcacgcttctctccatcacgccttctcctagcgctcgggtttctgtgtttcatcgctcctcagccggtctccaaccgtcgtcttcactcgccatggaccccaactgctcctgtgctacaggtaagggggactgctgacgggcctccgcagcctaagtttctccgagagcwwggcaaggtgtttggggtcccttctctagtcactttcagggtactacctgctgccctttcccaacgaattctggagaaccccttttaaccagtcttcacccaagctgggtcggggatttgcacttgagttcctatgggaactcctgcgtccaggtgcgtcaggtcgcgctaactgccttgtccctgcagatggatcctgctcctgcgctgggtcttgcaaatgcaaagagtgcaaatgcaccacctgcaagaaaagtaagttggatcctctctatccctttacccttcgctctgcatcagcccctagtccgccctaccatcccgggagcatccaggtgtggtgcctctgactcagtttttccgctcacggtcaactcttctcctctaggctgctgctcctgctgcccggtgggctgtgcgaagtgctcccagggctgcgtctgcaaagaggcttcggacannnnnnnnnnnnnnnnnnnnnnnnnnnnnnnnntcagctgcctgtaaatagagcaatgtgtagaaacgtatttttttttacaaccccggcctattcgccacacccctttctataaagcatstaattgataataaaagcgttgacttgattaactcagcttgtctttgtgtgcattggaaataagggactgggcggagtttgaaatggaactgcagaggcttgagttctggactcaaatactagtttgtggcttgggctgctcaggttacctctcgggcttttatcctggaagtggtgggcaagaagatggcactagtcacacaaatgtgccagtccccactgtgcatgtgtatattggggattaaacctagggcttccggcactaatgagtcacacccctaccccctagatacaagatactctttctctctccaaattcagttggattttaggcttcacattgacttaagtatggaatgccagtacctaaacttaagtaaataaaacaaaaagtaagaattagaggggctggctattggtgcctgcctttaatccagcagaggctggtgaatcctgagttgggaggctagcctcatctacagaacaagttctggggtggccagggat

SEQ ID NO: 4110 - DNA, 600 bp, Mesocricetus auratus
gcggtgttcgcttggttccagtggggctcgccgcgcctcccgcttctcggtgctcgcctcgtctsagctccgaccccatggcggctctggtgttggaggacgggtcggtgctgcagggccggccctttggggccgctgtgtcgactgctggggaagtggtgtttcagaccggcatggtcggctacccagaggccctcactgacccttcctacaaagctcagatcctggtgctcacgtaccctctcatcggcaactacggcattccctcagatgaagaggacgagttcggcctgagcaagtggtttgaatcctcggagawccacgtggcaggactggtggtgggagaatgctgtcccacgcccagccactggagtgccacctgcaccctgcatgagtggctgcagcagcatggcatccccggcctgcaaggagtagacactcgggagctgactaaaaagttgcgggagcaagggtctcttttggggaagctggtccagagtgggacagagccttcaaccctgccgttcgtggaccccaatgccaggcccctggcaccagaggtwtckattaagaccccacgggtattcaatgcagggggtg

SEQ ID NO: 4111 - DNA, 600 bp, Cricetinae gen. sp.
aggtgcggcctcagcctcccttgactccggagggccctctgcctcctgtgcggcctgctggcgctactctggaaagacccaagactctctctcctgggaagaatggggtcgtcaaagacgtctttacctttgggggtgctgtggagaaccccgagtacctagtacccagaggaggctctgcttctcaaccccatcctcccgccttgtgcccagcctttgacaacctctattactgggaccaggacccatcagagcgggggtctccaccaaatacctttgaagggacccctacagcagagaaccccgagtacttgggcctggatgtgcccgtgtgacgtcacgtttgtagaggccctgttctgccttcagagtgagggaggcctggtctccttcaccccaaagcagggggaggtcctctggccacattatttccagggcagcctgcttgccaggagcccaccctgcggaaccttccttgctgcttgagtcctgagtggttgacaggggccccctggttggaagaggtggcacactgaacagcctcattggatcacagaccctgccctgacaccctgtagggtccaggggcatcacagtcat

SEQ ID NO: 4112 - DNA, 600 bp, Cricetinae gen. sp.
gaccaaatcagaagagaacartatgttccaaaycaagmatttgttaactcrgacctccttgagaagaacaaatayagaaagatctattcttttactcttgaaccccgtactattgaggactttgagtcyatsaatrcctaccttcagacrtcrccagcatcygtrtttacaagcaaatcattttgttctttgcagaccccagaaggggttcactgtttagtgggctgcaccctcacctatagghrattcagttayaaggacaatgtagatcttgtrgagttyaagagtctgaaggaggaagaaatagaagatgtrctsaaaactatatttggcatttctttagagaaaaaacttgtgcccaarcatggtgatagrttttttaccatttagaataagcagcagtagaagttttcagtgtccctccawrkacytggatttttaatgataaattttcaaacagatttacagtgcatgtaatcacatgagcctttttgcattcattccgcagctgactagttattggtaaataataatttcttgtctcctctctacccctatattttcattagcagtaatcacaccttggataaacctcattgg

SEQ ID NO: 4113 - DNA, 552 bp, Mesocricetus auratus
  misc_feature (335)..(359): n is a, c, g, or t
ttctgctgatagatcattctcaggatattcagctgcaatctggactaaaggctaatatggagatccaaggtggtctagctattgatatttcaggttcaatggaattcagtctgtggtatcgtgagtccaaaacccgagtgaaaaatcgggtggctgtggtaatagacagcgctgtcacagtggactcttctttcgtgaaagctggcctggagagcagggcggagacagaggcgggtctggagttcatctccacagtgcagttctctcagtacccgttcctggtctgcatgcagatggaccgggctgaagctcccttcaggcaatttgagacaaannnnnnnnnnnnnnnnnnnnnnnnnggctatgtctctcggagaagaaaagaaagcctagtgtctgggtatgaactcccactccatcaagagaactctgagatgtgcaacatggtgttcccccctcagccagagagtgataactcgggaggatggttttgaaactgatgagtggtgtttccctcagatccatttctttgagagtgatatacttcgacgt

SEQ ID NO: 4114 - DNA, 600 bp, Cricetulus griseus
gagatggcagacagatatgatcgcttgttggagacctgctctatcgctcttgtgggcaaatacaccaaaytctcagactcctatgcatctgtcattaaagctctagagcattctgcattggctattaaccacaagttagagataaagtacattgattccacagacctggagcctagcaccctgcaggaggagcctgtgcgttaccatgaggcatggcagaagctctgcagtgctcatggagtgctggttccaggaggatttggtgttcgaggaacagaaggaaaaattcaagcaattgcctgggctcggaaacagaagaagccttttttgggtgtgtgcttaggaatgcagctagcagtggtagaattctcaagaaatgtgctgggatggcaagatgccaactctacagaatttgaccctaagactagtcatcctgtggtcatagacatgccagaacataaccctgggcagatgggtggaaccatgaggctgggcaagagtagaaccctgttccagaccaagaactcagtcatgagtaaactctatggagacacagactacttggaagagaggcaccgccaccgatttgaggtgaatcca

SEQ ID NO: 4115 - DNA, 1400 bp, Cricetinae gen. sp.
tggatgtgatcactggcacatcatttggagtgaatgtcgattccctcaacaacccagaggatccctttgtgcagaaggccaggaagattttaaagtttaatttttttgatccctttattctctccataatactgtttccattccttaccacaatatatgacttgttaaggttctccatttttccaagacaatcaacaaactttttcaaaaaatttataacaacgatgaagaaaaatcgccttcattcaaaccagaagacccgaatggatttttttcagctgatgatgaacactcagaattccaaaggcaaagagtcccagaaagctctttccgatctagaaatggcagcacaagccattattttcattttcgctggttatgaatccacaagcacctccatttgtctcgtattgtatgaactggccacccaccctgatgtgcagaagaaacttcacgatgagattgacagcgctctgcccaataaggcacctgtcacctatgatgtcctgatgggcatggagtacctggacatggtgataaatgaaggtctcagattgtacccaattgctaacaggctagagaggatctcgaagaaggctgtagaaatcaatggactgttcattcctaaagggattacagttatggtaccaacctatcctcttcatcgggaccctgagtactggccagagcctgaggagttccgccctgaaaggttcagcaaagagaacaagggcagcattgatccttatgtatacatgccctttgggaacggacccaggaactgcattggcatgaggtttgccctcctaagcatgaaactggctgtcgtcagtgtcctgcagaacttcaccctccagacttgtgagcaaacagagaaccacctgaagttcgccaggcaaataattctccagccagaaaaccccatcatcctgaagatcatatcaagagataaacccataaccggagcatgaatttccctcaggaattatgctatattcttcaatgggactgtgtcacagaacaccagcaaatttaatttagcacagaatgtagcacagatgaaattggcttactgaactttcattgatgattgagaactcagtacttcactgaatgtgttcagtgtctatagggagtattatctattgtgtaattcaatggaaataattaagtcaatgatagttgtggagattcatcttctgattctcttgtaaccatctacactaattgcaattagttccatcaattctgagctccaactgtagtaactgtttctttatagttctatcaataatttttatgaaaatagaaactattgtgttgactgttagtaaaaatatatcaaactgtttctttgtaaaattttatgatattgaggatataaataaatatctccttca

SEQ ID NO: 4116 - DNA, 440 bp, Cricetulus griseus; identical to SEQ ID NO: 474

SEQ ID NO: 4117 - DNA, 357 bp, Cricetulus griseus; identical to SEQ ID NO: 475

SEQ ID NO: 4118 - DNA, 902 bp, Cricetulus migratorius; identical to SEQ ID NO: 476

SEQ ID NO: 4119 - DNA, 1223 bp, Mesocricetus auratus; identical to SEQ ID NO: 477
  misc_feature (333)..(350): n is a, c, g, or t

SEQ ID NO: 4120 - DNA, 197 bp, Mesocricetus auratus
tcaactcatatatggattttagacataggatggatcaggatagtgccagtctgcacttccactgatcgcgcgtcagggaaacaggaaagaacctaaaagatatgcatatatgcatagtacccaagagaagaggattgagacaagatcctctgaatggatggggaacacggcgagggctggggaggagtaggagctgg

SEQ ID NO: 4121 - DNA, 248 bp, Mesocricetus auratus; identical to SEQ ID NO: 479

SEQ ID NO: 4122 - DNA, 235 bp, Mesocricetus auratus
  misc_feature (76)..(93): n is a, c, g, or t
  misc_feature (183)..(183): n is a, c, g, or t
agcagaaaaaacacaataaaatgaaagtagaaaagaaaaaaatacaaagaagtaaaaataatcacgcactctcacnnnnnnnnnnnnnnnnnncacacaccgataccaaagcacaatctccagtgttaatagtgattaaaaaaatacagagtaagtgaaacagcgcaagaaaaatgtgtgatngtctgtgccagccttcctttgtcctgtttgtcccagaactttattctaggtc

SEQ ID NO: 4123 - DNA, 193 bp, Mesocricetus auratus; identical to SEQ ID NO: 481

SEQ ID NO: 4124 - DNA, 185 bp, Mesocricetus auratus; identical to SEQ ID NO: 482

SEQ ID NO: 4125 - DNA, 238 bp, Mesocricetus auratus; identical to SEQ ID NO: 483

SEQ ID NO: 4126 - DNA, 233 bp, Mesocricetus auratus
gaatctctgtgcttaacttcatgaaaactaacgatacaacactgtgtgagaatctccctgcttaacttcatgaaaattaacggtacaacactgtgtgtgatactatgtgctaaacttcatgaaaactaacgatacaacactgtgtgtgaaaccctgtgctcaacctcatgaaaactaacgatacaacactgtgtgtgatcctatgtgctcaacatcatgaaaactaacaatac

SEQ ID NO: 4127 - DNA, 265 bp, Mesocricetus auratus; identical to SEQ ID NO: 485

SEQ ID NO: 4128 - DNA, 272 bp, Mesocricetus auratus; identical to SEQ ID NO: 486

SEQ ID NO: 4129 - DNA, 600 bp, Cricetulus griseus
ctggcctctgccttcaccgtggtgattgcctccaacattggacttcccgtcagcaccacacactgcaaggtgggctcagtagtagctgtgggctggatacgctctcggaaggctgtggactggcacctcttccggaacatatttgtggcctggttcgtgactgtcccygtggccggattattcagtgctgctatcatggctatcttcatgtatggratcctwycatakgtgtgattttgtttcttccagtcgggaaatggctatggggacggtctaacgtgggtatgcgtattcacacctctccacccccactgtttgacacaagcacacccctcccacataccttcccagatggtttgacgccacacactgcttacccaggccacagaagttcatcttccagaattaacctaactactgtacatagtaggtgtatatcaaactgatattgtgatgacataatgtggtgcagttacttatattaaatatatattgtgtacctagaatattgtagcatttattccaaacaaactcagaatgaaagtggagagtaccgcctggaattgcaaatattcttgttaagtgtattttaatgatttc

SEQ ID NO: 4130 - DNA, 596 bp, Cricetulus griseus
  misc_feature (101)..(157): n is a, c, g, or t
  misc_feature (367)..(445): n is a, c, g, or t
gcaacaccaatatggcttctrctytatggtggtgttggyatctgyrtwggkctgtgggtttggggaagaagagttatccagaccatggggaaggatctgannnnnnnnnnnnnnnnnnnnnnnnnnnnnnnnnnnnnnnnnnnnnnnnnnnnnnnnntgattgcatcaaayattggccttcccatcagyacaacacaytgtaaagtgggctctgttgtgtctgttggctggctccgrtccaagaaggctgtygactggcgwctstttcgyaacatttttatggcctggtttgtcacagtccccatttctggrgttatyagtgctgccatcatggcaatcttcagatatgtcatcctcagaatgtgannnnnnnnnnnnnnnnnnnnnnnnnnnnnnnnnnnnnnnnnnnnnnnnnnnnnnnnnnnnnnnnnnnnnnnnnnnnnnngaagacagacaaggtcaaagtttggagccatggggagtgtaattacactataatgcttttgtgctaaaatgactgtctcaaaatagctatgaaaatagccagtttccatggtcacctaagtcccttttcttctggcatgatcgaacaactt

SEQ ID NO: 4131 - DNA, 1400 bp, Cricetinae gen. sp.
  misc_feature (550)..(570): n is a, c, g, or t
  misc_feature (640)..(660): n is a, c, g, or t
ttggctatgatgatgccgtcagcttcagttacaaggcaatgttcgtgaaaaaagaacattttgggggggccatggtgtggacactggatatggatgacgtcaggggcactttctgtggcaatggccctttcccccttgtccatatattgaatgagctcttggtgcgggcagagttcaactcaacccctttgccacaattttggtttacattgcctgtgaattcctcaggacctggctctgagagtcttcccgtgacagaggagttgaccactgatactgtaaagattttgcccccaggaggagaggctatggccactgaggtccacagaaagtatgaaaaggtgactacaatccctaacggtggatttgtgactcctgcgggaacgacatctcctacaacacatgctgtagctctagaaagaaacgctatggctcctggggcaaaaactacaacctcactggaccttctgtctgagaccatgactgggatgacagtgacagtccagacacagacagctgggagagagaccatgaccacagtgggtaatcnnnnnnnnnnnnnnnnnnnnnagaccatgaccacagtgggtaatcagtctgtgacccctgggggagagaccgtgaccacagtgggtaatcnnnnnnnnnnnnnnnnnnnnnagaccatgaccacagtgggtaatcagtctgtgacccctgggggagagaccgtgaccatagtgggtaataagtctgtgacccctgtgggagagaccgtgaccatagtgggtaataagtctgtgacccctgggggacagaycacagccacagtgggtagtcagtctgtgacccctccagggatggatacaactcttgtctatcttcagactatgactctcagtgagaagggaacttctagcaagaaggctgtggtccttgaaaaggtcactgttcctcctagagagatatcagttatgcccaatgaacagaatacagctctaaatcgggagaatttgattgctgaggtggaaagttattcccaggatgggtgaattggcccttatgtaaaagcggagaacaggatgctctcctccagctttatcgtcctgttcccaggatatgtgcctttttcttttgaaaatggcttcactcttactaatggaaaccactcctttgtcaactcaatagtccttctaacaaatctcttcctcttaaaaaaaagaaaacctaggacaccctgttatggatcaagaatgttgagctccattagtggcaaatcctagagaaaaactcttgttttttcttctatgtggtatgacagaagccatctcatattgccacccatgaaccatttgtgggacaaggttggcaccaaagccatggggcaatctcctttctgtcgaataaattggaagcatgag

SEQ ID NO: 4132 - DNA, 600 bp, Mesocricetus auratus
atatgtgtattttaaataaaagatctccagtttcccttttaagatccagaaggacaggaaaacttcgaagagatgttgtttaaactgtttacatggtgtttcccatctctaagaggcccctctgaagtgagagagaagcgcttgcctggatttggaaagctcactgagaaagcgctaatccaagtacgtgagaagaaatacgcgaagcggccagtggctgtggacacaaccagaggctgaagccttctatcgtgtagaaagctttttgcccttcaaagacagagactgtgtagagaagaaggatagttggacgagaacgaagatgggaaatggaataaaacagttgatcaccgtggttgggaaaatcggttggtggagtggggactgaagaccacaaagggaatgcccccaaactcccttgttgagcataaaacraaatattctctaccgctgagctgttgtttttggttttatatgagaagaggcaacctctctggtcagacaatttatccgagtcgtgtagagaggacgtcttcctaactcttaggaagatctattaccttttgtggaagacaaagggtcctttcagggtgcaagctt

SEQ ID NO: 4133 - DNA, 600 bp, Mesocricetus auratus
cttacccagacagtacaccttcctcctcagagttccctctgacccagtccctctgttcccagggtgtggaggatgccttctacacactagtacgtgagattcggcagcataaactgcggaagctgaacccacccgatgagagtggccctggctgcatgagctgcaagtgtgtgctatcctgacagcaggtgaggcagggaccagccgacatctggcagtggccccagctagccagatgaacttcatatccactctgatgtccctgctccccccatcctgccaattcccctgctgcggtcagtggtgtcctttgtgcccgtctcggcacaggctcacgacgtggaggtgccggatgcagggaggaggtgcagacggaaggaaggaaagagaagggaaggaaggaaggaaacgatgctggagccagtccagtccagggatggtggacagaggtgaccaagaccttcgcatggacaatttgaacagactgtcatgaactgtccctattgccactggcaccccagtcctcaacccctctcagttcctttgggcgcctatggggcacaggttgaatcacagtaaattatttgatggtcaaaaaaa

SEQ ID NO: 4134 - DNA, 600 bp, Cricetinae gen. sp.
argtaccagcccgarcaacctaayctggtataccagatggccagaaccaccgatgagttagatcatgtagaccagaatgagctggtcagtgccagtgactcccagacaggctttttaccagtaactgagaacttttctctgaaatccaaactctcacccaagaatatggaaccaacccaattctcaggcctaattgtgaactgttcaacaaccctcctaactaatcttatcatcatcgtgtgcattgtggccgtgctcccaagagagcctctggctgaagggacgctgtgggcagtctttgtaatgacagggtcagtcctcctctgcatgctggtgacaggcatcatctggaggcagcctgaaagcaagaccaagctcacatttaaggtaccctttgtccccgtacttcctatcttgagtatcttcgtgaatgtctatctcatgatgcagctggatcaaggcacatgggtccggttcgcagtgtggatgctgataggcttcagcatctacttcggttacggactgtggcacagtgaggaggcgtccctggctgctggccaggcaaggactcccgacagcaacttggaccagtgcaaatga

SEQ ID NO: 4135 - DNA, 600 bp, Phodopus sungorus
agcgtcatcggctctgtcttcaacatcacagccattgctatcaaccgctactggtgcatctgccacagtgcaacctaccaccacgtctgcagtcactggcatgcccccttctacatcggcctcatctggctcctcactctggtggccttggtgcccaatttctttgtagggtccctagagtawgacccacgcayctattcctgcaccttcawccagacagccagcacccagtatactgcggctgtggtggccatccatttcctctttccaatcgctgtggtatccttctgctacctgtgaatctgggtgctggtgctccaggcccgaaggaaggccaaggctgacagtaagctgcacctaagacccgttgacttgcccagtttcctaaccatgtttgcagtgtttgtggtttttgccatatgctggggccccctcaactgcatcgcccttgcagtagccctcaacccagaggtgatggctctccgggtaccagaagggcttttcgtcaccaactacttcctagcttacttcaacagctgccttaacgccattgtctacgggctcctgaaccagaacttccgccaggagtacaagaggatc

SEQ ID NO: 4136 - DNA, 1399 bp, Phodopus sungorus; identical to SEQ ID NO: 494
  misc_feature (348)..(391): n is a, c, g, or t

SEQ ID NO: 4137 - DNA, 600 bp, Mesocricetus auratus
gactacgagactcacgagtttcatttgccaagtggagtgaaaagtttgaatgttcagaaggcgtccactgagaggattaccagcaatgctaccagtgacttaaatatcaaagttgatgggcgtgcgattgttcgtggtaatgaaggcgtgttcatcatgggcaaaacyattgaatttcacatggggggcaatgtggagctaaaggccgaaaacagcatcatcctcaatggaactgtgatggtcagcccaackcgcctgcccagttcctcaagtggggaccagtygggaggtggtgactgggtgcgctacaaactctgcatgtgtgccgatggcacgctcttcaaagtgcaagtaacgggccacaacatgggctgccaggtggcagacaacccctgtgggaacactcattagaagctccagccccagggtcaatatgatccgatctcagcttgaccttttcttttcatgaatgcatgtgaaccaggttttgcagtttgtgataacttgtatttgaactggggagcaccactgtatctgttacgtgctctccatatttaagggatttttgagtgcctaaattctaatatgctttattaagtt

SEQ ID NO: 4138 - DNA, 1400 bp, Mesocricetus auratus
  misc_feature (1143)..(1160): n is a, c, g, or t
gggcacccacatagagaggcccgagagccagcttgtccacaggatcgggatttatggctggaggaagcgctgtctctacctatttgttcttctcttgctcatcatccttgttgtgaatctcgctctcacaatctggattctgaaagtgatgtggttttctccaataggaatgggtcacttgcatgttacgcaagatggacttcgcctggaaggggaatcagagtttttatttccactgtatgtcaaagaaatacgctccagagtggactcatctctgcttctgcagtcaactcagaatgtgacagtcaatgctcgcaactcagaaggggaggtcacaggcagggtgaaagtgggtgcccaaatggtagaagtccagagccagcacttccagatccgttctgaagacggcaagccactgttcaccgccgaggagcggggtgtcatggtcgataccggcagactgcgagtaaccgggccagaaggcgctattttcgaacactcagtggagacaccccttgtcagagctgacccatttgaagaccttcggttagaatccccaacccggagtctaagcatggatgccccaaggggagttcacattaaagctcacacggggaagatggaggccctttctcaaatggacatcatcttgcagagtagtgatggagtgctggtgcttgatgctgagactgtgggtttgcccgagttggagcaagggacaccgggtccctctggcagttctaagggattctatgagatttgtgtgtgtcccgatgggaagctgtacctgtctgcggctgatgaggccaccacctgcgaggaacacagccacatctgtctctgaccactacctcttctgcagaacagatgttgtcttggtgagctgtggcctcagccttcatgtccctggcagctggacgggagctggtagattcactgctaagcacttagaagcttgcagggggagtgtgcccatggaaccattgggctagagtgcctgctttcagcatggcacaaagaaatgtcaagaacttagtcactggattttcatctttctagcctccttccacatctctcgtgttgaactgctgtctgcaagcagtttatagtactcaacagcagacatctatacacacacacaannnnnnnnnnnnnnnnnnctgactagtggattctaaaatgccccaactctgcacaacccttcctttacgttaagcctcaagtgctcccttcagtcaagtgcagtgtgtcaggttttactaagagatctccagagtttgaagggagtctgaagttgatagattttcaatatgtagttaggggaagaaattacacaaaattagtcatgctttttatacacataccaatgagcaataaaatgacattgcttttcagaccag

SEQ ID NO: 4139 - DNA, 964 bp, Cricetinae gen. sp.; identical to SEQ ID NO: 497
  misc_feature (854)..(869): n is a, c, g, or t

SEQ ID NO: 4140 - DNA, 600 bp, Cricetulus griseus
ggggcccagcaggaagaactatgaacgcttcctgccccctgatgccttcatccacgtggatgactttgagagcccagcagacctggctcagtacctgcagaagctagacaaggacagccagagctaccagcgctacttccgctggagggagacgctcaggcctcgcttgtctagcatggcccttgccttctgccaggcatgcaggcagctgcagtgggaccagaggtaccagacggtccacagtgtggcctcttggttccactgaggtggctggccagagtcctgcaggcagtgtcccactcgaaagtcatcctctgtcgcccctggtgctagacactcccttgatgagcatctcagctgctcagagccttgattctggggtcttcatctttgctcactggggatgtgagttcccagaagcctgagctgtatcgagagaccctgctgctgacacactctacttcccagagccccaccctctcccactggtgggtggtgggtctgcctcaattgctcctggtgcacgacataagtaacgtctgaggtgcttgcagggatgtggtactgtcacagtgatccagatgagaccttattctgtca

SEQ ID NO: 4141 - DNA, 709 bp, Cricetulus griseus; identical to SEQ ID NO: 499
  misc_feature (178)..(195): n is a, c, g, or t
  misc_feature (263)..(284): n is a, c, g, or t

SEQ ID NO: 4142 - DNA, 1400 bp, Cricetulus sp.
  misc_feature (482)..(506): n is a, c, g, or t
ggtacagacaacgctggcctctgtccaagagctactgagacagcagcagcagaaggtccaagagctggcccatgagctggccgctgccaaggccaccacatcaaccaactggatcctggagtcccagaatatcaatgagctcaagtcggaaatcaactccttgaaagggcttctcttgaataggaggcagttcccgccctccccatcagccccgaagattccctcctggcagatcccagtgaagtcgccctcgccctccagccccgcggccgtgaaccaccacagcagcagcgacatctctcctgtcagcaacgagtccacatcatcctctcctgggaaggagagccacagccccgagggctccacggccacctaccacctgctgggcccccaggaggagggggagggggtggtggacgtcaagggccaggtgaggatggaggtgcagggggargaggagaagagggaggacaaggaggagnnnnnnnnnnnnnnnnnnnnnnnnngtgagccacgtggatgaggaagacgtgcttggggtgcagagggaggaccggcggggcggtgacgggcagatcaatgagcaggtggacaagcttcggcggccagagggcgccagcaacgagagcgagcggcactaggtgggcgcttgcttgcccgccttcccagcgccccaggacatcagtggcaggtgggcatgagcgtggctctgcctccatgagggtggctggcaacccaggtaggggtgaggctgtcctcagctgcagcagtgtggggttcctccgttcaccakcctcccaaacacctcccccagccctggtggctctggctgttggaggccaagcggaggactccagagccctgtgctcacacccctgcctacccctcctggacaggtgtcctgtccaggtgtgtcctctgaggatcttgactacctgacaccatgcatggccagagctcatgtcatctcctgcctcctgtcaccttagtgcagggggctgtggcccccatggtcttgctgtctcctactgtgccctggcttggcctggggcttcttttttgcctgttccaaaagccagagccctggacctgctcttcatctgtgggcctgccaggacccagcctccctacaaccaggtcctggctgacagatgctcccacctgccctgttgtcctgtataccacacaagaccatcctcgcttgctgtgtcatggtttggctactcagtggtgaggtgtgcttctccctcctgcagtggagccaggcagcagggccttcctgaccaacagccacatctgtcctgcccactgagaaacatgttcatttatgtgatcatgtatagatttcagaatataagatatgactgtacatattgtaataaatatgagttgccatattt

SEQ ID NO: 4143 - DNA, 576 bp, Cricetulus griseus
gagctgcagcagaartttcgaagtgacaccatcacagaggaggagctggtggggctcatgaacaagtttgtggaagacacaaagaraggratgcatgagaaggaaggctggcctaatagtgcttatggggtgaccaagattggggtgacagtcctgtccrgaatccatgcccggraactcagccagcagaggagagmwgacaagatcctcctcaatgcctgttgcccagggtgggtgagaacagacatggcaggaccaaaagccmccaagagyccagaagaaggagcagagacccccgtgtacttggcccttttgcccccagrtgcagaggggcctcatgggcagtttgttcaggagaaaaaagtagaacaatggtgaactcaactcttccccyctccccayagcaccctctcyctagytgtawcctgtcttggtgaggactgtggacatttatratctgctgacacaatatactaatttaactctcattaattacwtgagtcattgacccttgtrattctrtgaawtaytttatgattctgtctgtgwtacaggaaagagaaaaagtaaattctc

SEQ ID NO: 4144 - DNA, 600 bp, Cricetulus griseus
ctcctggtgaagaaggggcgagtggggcaggactgggtcccagcaagcgtgtcttgggatccctgttgtctgactccctgtttcttgaagtgaaagagctcttcctggcagctgtgcgtctggaccctacatccattgaccctgacgtgcagtgtggcttgggagtcctcttcaacctgagtggggagtacgacaaggctgtggactgttttacggctgccctcagtgttcgtcccaatgactatttgttgtggaacaaacttggggccacactggccaacgggaaccagagtgaagaggcagtggctgcgtaccgtagagcccttgaactacagcctgggtatatccggtsccgctataacctargcatcagctgcatcaaccttcggggctcaccgtgaggctgkkgaacactttctggaggccctgaacatgcaraggargagccggggccctcggggtgaggggggcgccatgtcagagaacatctggagtaccctgcggttggccttgtctatgttaggccagagtgacgcctatggggcagctgatgctcgggatctgtctgccctcctagctatgtttggcctgccccagtga

SEQ ID NO: 4145 - DNA, 600 bp, Cricetinae gen. sp.
  misc_feature (295)..(300): n is a, c, g, or t
  misc_feature (501)..(515): n is a, c, g, or t
taccagggagtctggaaaccaaggaaaataccaaatccagatttctttgaagayctagaaccttttaagatgackcctttyagtgctattggtttggagctstggtccatgacytctgacatyttttttgacaactttatcattagtggtgaccgaagrgtrgttgatgattgggccaatgatgggtggggcctgaagaaagctgctgatggggctgcygakccaggtgtagtggggcakatgctggargcagctgaagagcgtccgtggctstgggtggtctacattctgactnnnnnnttgccagtgtttcttgtgatcctcttctgctgctccggaaagaaacagtccagtgctatgcagtacaagaagacagatgctccccagccagatgtgaaggaagaagatgggaaggaagaagagaagaacaagggggatgaagaggaagaaggagaagagaagcttgaagagaaacagaaaagtgatgctgaagatgatggnnnnnnnnnnnnnnnagatgaggaagatagaaaacctactgcagaggaggatgaaattttgaacagatcaccaagaaacagaaagccacgaagagagtga

SEQ ID NO: 4146 - DNA, 600 bp, Cricetulus sp.
  misc_feature (433)..(511): n is a, c, g, or t
actaaagacagtgggtcaatgtcactacaagagacaagaagacagaagaaaacattgaagaaaacacgcaaatttattgttgatggtgtagaagtgagtgttacaacgtcaaagatagttacagatagtgactccaaaactgaggaattgcggtttctcagacgtcaggaacttcgagagctgagatttctccagaaagaggagcagagggcccagcagcagctcaatggcaaactgcagcagcagcgggagcagattttcaggcgctttgagcaggagatgatgagtaagaagcgacaatatgaccaggaaattgagaatcttgagaagcagcagaaacagacaattgaacgactagaacaagaacatacgaaccgcttgcgagatgaagctaaacgaatcaaaggagagcaagagaaggagctgtccaaannnnnnnnnnnnnnnnnnnnnnnnnnnnnnnnnnnnnnnnnnnnnnnnnnnnnnnnnnnnnnnnnnnnnnnnnnnnnnntgaaaaagatcatccaaaacagaaggcagagttggctaatattgagagagagtgtttgaataacaagcaacagcttatgagagctcgag

SEQ ID NO: 4147 - DNA, 1234 bp, Cricetulus griseus; identical to SEQ ID NO: 505

SEQ ID NO: 4148 - DNA, 596 bp, Cricetulus griseus
  misc_feature (405)..(461): n is a, c, g, or t
accactgccaccaccaccatcactgctgctgctgctgttaccaccaccactgaccccagctacattcctcaactatcaaattctccaagttctcaaaactcactgtaatgctttcagggccaccattgaccctatctgagccacccatctctccacaagaagcaaatcacctcctcccctcactccagcccctgcaaagggaagaagaacagcctatcagtctgtccctagactcctcaagacaggagttaggaacaatggggaggaaccttgagcctcagagggataaagaccaaaccacactccctagtgtctatgggcaagctcctcaaaattcaaatgaaatggtcaaggacacccatgtgagaagacctgcccatggccacaccagcttcagtgccactnnnnnnnnnnnnnnnnnnnnnnnnnnnnnnnnnnnnnnnnnnnnnnnnnnnnnnnnnctagagatgtcccctaaccaactccatactccatggtcatcatcccacccacaggcagccttctcaccaaaggaaggcagaagtagcagctatgatttccctaccccaaccttgcaattaaatcctccaacagtt

SEQ ID NO: 4149 - DNA, 600 bp, Cricetulus griseus
cattgattgtgctgctgtctatggcaacgagattgaaattggagaggccctgaaggaaaatgtgggaccaggcaaggcagtgcctcsagaggagctgtttgtgacatccaagctgtggaacactaagcaccaccctgaggatgtakaagctgccctccsgragacactggctgatctccarctggagtatctggacctctacttgatgcactggccttatgcctttgagaggggagacaatccatttcccaagaatgacgatggaaccatccgctatgactcaacccactacaakgagacctggaaggctctggaggcactggtggcaaargggctggtgaaagccttgggcttgtccaacttcaacagtcgacagattgatgatatcctcagtgtggcctctgtgcgcccagctgtcttgcaggtggaatgccatccatacctggctcaaaatgagctcattgctcattgtcaagcacgaggcttggaggtgactgcttatagccccttgggctcctcagatcgtgcgtggcgccatcctgatgagccagtcttgcttgaggaaccagtggtcttggcactagctgagaagcatggccg

SEQ ID NO: 4150 - DNA, 1400 bp, Cricetulus griseus
  misc_feature (570)..(596): n is a, c, g, or t
ctgaagctgaagaacgtgtttcttgcctacttcctggtgtcgatcgccggcctcctctacgctctggtgcagcttggccagccatgtgactgcctccctccgcttcgagctgcagctgagcagcttcgacagaaggacctgaggatttcccagttgcaagctgatctccgtcgaccaccccctgtcccagcccagccccctgagcccgaggctctgcccactatctatgtcattacccccacctatgccaggctggtacagaaggcagagctggttcggctgtcccagaccctgagcctggtgccccgtctacactggctgctggtggaggacgctgagagccctaccccgctggtctcggggctgctggctgcctctggtctcctcttcacacacctggctgtcctaacccccaaggctcagcggcttakggaaggcgagccargatgggttcggccccgaggagtakaacagcgcaacaaggccctggactggctccgakgcaaagggggtgctgttggcggkgagaaagacccaccaccaccagggacccaggragtggtgtatttnnnnnnnnnnnnnnnnnnnnnnnnnnnggagctctttaaggagatgcgttggactcgtggtgtctcagtgtggcctgtggggctggtgggcggcctgcgatttgagggtcctcgggtacaggatggccgggttgtgggtttccacacagcatgggaacccaacaggccctttcccctggacatggcgggatttgctgttgccctgcccttgctgttggctaagcccaatgcccagtttgatgcaactgcaccccggggccacttggagagtagtctcctgagccatcttgtggatcccaaggacctagagccacgggctgccaactgtactcaggtactagtgtggcacacacggacagagaaacctaagatgaagcaggaggagcagctgcagcggcagggccagggctcagacccagccattgaggtgtgatggcagcctcaccctgacttctaccttattttaggcacataccttgtgggactgggctccaggccagtccaggatgtggttttttaaaaagacctgacccctcagaaccagaggcagcccctccaaccacagggtgtggcccagctgcttccctcccttcccccagcctgccatgtggcactgcccacaggctggggacaagcagttgttgtattgagccaggtcagccccatctggggtggagcaggacagatggactcaggagggagggtggctgagggaactgggtaacttattggggacaagcatgcactggggggctagaggagctgggctggaccctccccacctgagcatgcggatcctcttcctacctctagaataaagaatctcaacct

SEQ ID NO: 4151 - DNA, 1400 bp, Cricetulus griseus
  misc_feature (1124)..(1138): n is a, c, g, or t
cccggggaactggacctggcccgaggggtctcagcagaatctgagttgccaggcttttgggaacccaccccccaagctaacctgcagccggaaaacagatggagccctgctgcccatcggggaagtgaagactgtcacatgggccatgaacggtacctacgtgtgccatgccgtgagctcccatggaaatatcaccagggaagtgttcctgaaagtgcttccaaaatctccgatatggcccatcatcatcattgtggtaatactggctactgtggtctttgtgggggtcctgaccatttacatttataaccgccagagaaagatcaggatatacaagctacagagggcccaggaagaggccatgaaactcaaggtcccgcctcactgagccacaagaacaccaacacctccctgggcgtcccctgcgggcagcagctagtgctgcttttgaacagaaaggtagacaaacagtgtttaccctcaccacctcaggctgtgacaagacaagatgtggcctggggatgcacccaatcagacctccttggcctcacacttgtggcctcaggactgtgaggagaggacctgacaagatcaagggtgtgtttctgtgaactggacacacccacagcctgtgggcctccagtcaggaaatgctgacctcattacctattgcccatgctggagcctctgcctaakgaggagygatatccaatakatacatagcaaagttggaacacaagagtatacttcctctgactcakgaacgctgggacattgyccccaactctycatgatgatgtatttattaaagttttacctggaggttggggatgtagctcagtggtagagcccttagcaaggccctggggttggtcctcagctccaaaaagagaaaaaaagttttacctgctatttattgagtaccttgatactagagcagcaagcaggttcttgtcaggatagtgttgcagggactggatatacaacagagcccggagagaggttcacatagggctaggggtgcctctgttggtcaggatgcttttcccaaaagagccatcacaagaatactaagtgatctaacagtggctccctgctcgtaggcctctcttggagtcctgacnnnnnnnnnnnnnnnagtaaccacttccccacctacatacattcctacctttgctccccgtgtcaaccaccatacccaaatatggatgcccacccttggcagctaaacaggggagtctcatgctcatgaaatcgtggtcaatccctgcctggttccacctcaaacaaagcctgcaagaagatgctgcaactacttaggagggtcctgcaagctggggggtggggggtacaacactcccagctcagaagactttcatttgagtcaataaagtgttatg

SEQ ID NO: 4152 - DNA, 600 bp, Cricetinae gen. sp.
ccgaccagtccgggggcgcaggcggcctgcgcacccatctcaagatcacagattctgcrggccatattctgtatgccaaggargatgcmactaaggggaartttgcyttcaccacggaagactatgacatgtttgaagtgtgttttgagagcaagggaacagggcggatacctgaccaactcgtgattctagacatgaagcatggagtagaggcgaaaaattatgaagagattgcaaaagttgagaaactcaaaccattggargtggagttacgacgcctagaggacctttcagartcaatcgttaatgaytttgcctacatgaagaagcgggaagaggagatgcgygacaccaatgagtccacraacaccagagtcttgtacttcagcatcttttccatgctctgcctcattggactagccacctggcaggtgttctacctgcgtcgcttcttcaaggccaagaagttgatagagtaatgaggctcagtcttctgtcccctggtatctcagccagcagaacatcgctgggacgtgcctggcctggctcaaggccatcctactaacagtaccatcaaggcacagtggagctttcttgcca

SEQ ID NO: 4153 - DNA, 600 bp, Cricetulus griseus
  misc_feature (572)..(572): n is a, c, g, or t
tcggtgttcatttataaaataacgtggaaagaaacaagcccttctggtttattatttactcatmatcgccttttgacagccgtgctgtaacacaagtakatgcctgaacttgaattaatatacaaatcagtaatgtattctctctttctctctttatattctggtctctacactacattattaatgggttttgygtactgtaaaaaaaaaattasctgyatcaaactagygcatgawtagattctctcckgatwattkatyacacacatagccccatakcccgtkgtatattattmttgtggwtwgwgacacaatywactcctacttgaaatacgctttaaaaatcgatgggggatgcttcgtgtgaacstgggcatttagctgcttctctgkctaagtgtkmttttcmcgatcactatgcattttaaacattgttgagtattccaaatgatttaggaaaatttttccatgattgcatttactgtacagattgctgcctctgctctgtttgtggcatagggtgcgaggatacacattgatttctttgtgcctgttttatgtgcacacattangcattgagaatttgaacttttttttttt

SEQ ID NO: 4154 - DNA, 1400 bp, Cricetulus sp.
tgtagaattctcttcatcggctgcattacagctcctacagtgagacagtactatgcttacctcaccgacacacagtgtaagcgcgttgggacacagtgctgggtgtttggggtcattggctttctggaagctattgtttgcataaaattcggacawgatcttttctctaagacccakatactctacgttgtattttggcttctttgtgtggccttcaccacgttcctgtgtctgtacsgcatgagttkggttgcasagcactatggtcaccgggaaaagacctattcagagtgtgragatggcactccagagatctcctggcatcatgggaaaggctcaaaaggttctgaagacagccctcccaagcattcaagcaacaacgaaagccattcttccagaagaaggaaccggcattccaagtccaaagtcaccaatggagttggaaagaaatgaaggagcctcattaatttcagatgttccagagagtgcctagacctgagagggcaacagaacacattgggaccttcctatgtggagatcaaaatgtacagaacacacagaaggaacagagggggctttggggatcatgattggagagtgtaagtcttgtctcccatagctctgaacatacattaggctgaccatgacttggggtcctttgccaacaggaggtgtctcctaacttcagcatgaggcctgtggtttctggtagctatacagtgtgctggaaggacaggatagctgtttgctcctggttgccagcaatggctctgtgcccatgtgtctcgtggacgctgtaggactatcttcattcagatgtcaacttcaccaactggttaatgaattgttcactgggttttatttttatgaatctgcctttccatttgactgattgttttaagttcagtttgtttttccatcttttcctttgtgttttcaagttagaatgcttaaaaacttccagaatccactgctgaaattggggttccttctagagaagaaatgggtggggggagtttttttgtgtccctgcttagcatactcagtccctagccacatgacagatgaccagcagcctgagtttgaaggaggctggctgtttgcactggagcctgagcttcagactggaacctgttgtattccattccaaacgctgtttgtcccaactgagtgcacacaagtgaccctgctagaggatctggggcactgcggctcctctcctgccaggtgcctttcccatatgcttggttttccttctgtggtatgttgcctactttgtctttctgtctcatgtgaggtgctagtgagtattaagtttcatctgtgccatgctctcctagaacattttcccaccctggatccttgttttaaataaatcaattcacatgaaaaactcctca

SEQ ID NO: 4155 - DNA, 1400 bp, Cricetinae gen. sp.
  misc_feature (693)..(747): n is a, c, g, or t
ggccgcgcgagatcctgagtckcccaacggcgcyrcggactcrggtggcwgygctgagtccgtmcgtcccagcgcggccctcatggcgctgctccgacgcccgacggtgtccagtgatttgaagamtattgacacaggagttaatcctaaagctaagagccatgtgacyatycggcgggcagttttagaagaaattggaaataaagttagaascmgagcagcyccagtggctaagaaacctcagaacaccaaaataccagttcagcccaccaaagtgacamatgtcaacaaacagccraaacctacagcctctgtgaaacckgtacaratggagacmctggctccmaaggatccttctcctgcccctgaggatgtctccatgaaggaagagaacctctgccaagctttctctgatgctttgctctgcaagatygaggatatagataacgaagactgggagaaccctcagctctgcagygactacgtgaaggacatctaccagtatctcaggcagcttgaggttttgcagtcyatcaacccacayttcttagatggaagagatataaatggacgtatgcgtgccatcctggtggactggctggtccaagtycattccaarkttaggcttytgcargaaactctttacatgtgcattgccatcatggaccggttcctacaggcgcagccggtctnnnnnnnnnnnnnnnnnnnnnnnnnnnnnnnnnnnnnnnnnnnnnnnnnnnnnnncgaggagatgttttctccaaatatcgaagactttgtttatatcacagacaatgcttacaccagttcccaaatccgagaaatggagactctgattttgaaagagctaaaatttgagttgggtcggcctttgccgctccacttcttaaggcgagcctcaaaggctggggaggtggacgtggaacaacacacgctagccaagtatctgatggagctaacgctcatcgactatgacatggtgcactatcacccttctcaggtcgcagcggctgcttcctgcctttctcagaaggtgctgggccagggcaaatggaatttaaagcagcagtattacaccggatacatggagactgaagtactggaagtcatgcagcacatggccaagaacgtggtgaaagtcaacgaaaacctcaccaagttcatcgctgtcaagaacaagtatgccagcagcagactcctgaagatcagcacgatcccacagctgaactccaaaaccatcaaagaccttgcctcccctctgatgggcaggctctaggtggctggctcccgccatgcacatctgattttgtacatactcctgtagtttacttcacaaaacctcttctcagactaatctcctaattgtgtattgaggaaaaaataaagctattgcggcc

SEQ ID NO: 4156 - DNA, 600 bp, Cricetulus griseus
ccgagaaaccagcaacccrsscacctctgcccctcttctmgctccsggcccattacaacttgggggtgactaacctgaaactyyaccaggcatctggttctttcttyavggccatgaaatgcatcatcskccmtacgttccccttaaataagacatctcgatggtacgggtctaatcagcccatgcccaacataactgtggkctcgtgcctttggtatcttttatttttcggtatgctgtgactcaccatagccgtcaaggsrkgaaskycaacttattcgtgtagctggacttctctattcaagtgtcatttatccacatatacaatccccaaagacatactattcaatgctttcttcggacatatctttaatttacactagattttcaagccaaacccccctcccccactgataattactaactctgacaaaccccaaaaccagagatttcaataccaggtctctccaccattctagtaatccgccaaacataacttgaatttcaataagtgtaaaatttaccctatcgctttaaaattcctattgacacctagactagttttaatatacaagtgggtgacgggcataaacacgttaa

SEQ ID NO: 4157 - DNA, 1400 bp, Cricetinae gen. sp.
  misc_feature (462)..(487): n is a, c, g, or t
  misc_feature (811)..(825): n is a, c, g, or t
gtgtgcagtacctgaatgaaatcaaggacagtgtggtggctggcttccagtgggccactaaggaggtgagtggctggggcctgggtgttccttctctggagaccaatgctttcttgactttcagtaggtgttggagtgtggctgggtctgactaaccagctttcctagggcgctctctgtgaggagaacatgcgtggtgtgcgcttcgatgtccatgatgtgaccctacatgctgatgccatccaccgaagaggtggtcagatcattcccacagctcgtcgttgtctgtatgccagtgtgttgactgcacagccccgcctcatggagcctatctacctggtggagattcaggtaagaaaaaaaaaacatgcctgcctgtgtggcgcccattcacccttctgtgatgatgcagttctcactggtgctctctgtccttcagtgtcctgaacaggtcgtgggtgnnnnnnnnnnnnnnnnnnnnnnnnnncgtggccatgtgtttgaagagtcccaggtggctggcacccccatgtttgtagtcaaggcctatcttccagtcaacgagtcctttggtgagtgtcatggcttccccttggtgttcccagccctctgcactctagggtggctgcctcattgggtcaaaagcaaagtggtctgtgtatccagatggtggtgggcagggagccaggaaatgtggaaacccttcctgagtgggaagaccaggcagggggaagcacaaaccgaggggctaggctcttgctgagcctcttgcctttatccaggttttacagctgacctgcgctccaacacnnnnnnnnnnnnnnncccccagtgtgtgttcgaccactggcagattctgcccggggacccgttcgacaacagcagccgtggcagccaagtggtggctgagacccgcaagcgcaaaggtctaaaggagggcatcccagcactggacaacttcctggacaaactgtaggcaggcttgcacagccacacactgcacagtgcccacccatcagaagacaccttgagactgtccccataatgctgctctggaggtggctggggccaccctgccattgagcactaacacttgatgccgattctatttatttcggaatttccgaggcagtggagtcgccctctgcaggctggactggctggcgggccatggggtgggcaggacacagctctttatcattttcagagggaaaaatgctcagatatcaaacatctaaataaatgcattcagaggtttatggggttcattcatggactggagttgcccaggggatgcagatttgtggctcctgggaggtgggtgatctatcggccctgtctggccctttgcagtaataaaactgctgtggttgaccttcctggactttgccaatctggca

SEQ ID NO: 4158 - DNA, 950 bp, Cricetulus griseus; identical to SEQ ID NO: 516
  misc_feature (95)..(115): n is a, c, g, or t

SEQ ID NO: 4159 - DNA, 1400 bp, Cricetulus griseus
  misc_feature (72)..(91): n is a, c, g, or t
ccactggtttcctcacctatggacactgtcacagaggctggaatggccattgcaatggcgcttacaggaggnnnnnnnnnnnnnnnnnnnnactgtacacctgaattccaggccaatgaagttcggaaagtaaagaaatatgaacagggattcataactgatcctgtagtccttagccccaaggatcgtgtgagggatgtttytgaagccaaagccaggcatggcttctgtggtatccccatcacagatacaggccggatggggagtcgactggtgggcatcatttcttcaagggatattgattttctcaaggaggaagagcatgaccgtttcttggaggagatcatgacaaagagggaagatttggtggtggcccctgcaggcatcactctgaaggaggcaaatgaaattctgcagcgcagtaaaaagggaaagttgcccattgtgaatgaaaatgatgagctggtagccatcattgctcggacagacctgaagaagaatcgtgattacccattggcttccaaagatgccaaaaagcagctactatgtggggcagccattggtactcatgaggatgacaagtataggctggacttactggctcttgctggtgtggatgtagtggttttggactcttcccagggaaactccattttccaaatcaatatgatcaaatacatgaaagagaaataccccaatctccaagtcattggaggcaatgtagtcactgctgctcaagccaagaacctcatagacgcaggtgtggatgctctgcgagttggcatggggtgtggttccatctgcattactcaggaagtgttggcctgtggtcggccccaagcaacagcagtgtacaaggtttctgagtatgctcggcgctttggtgttcctgttattgctgatggaggaatccaaaatgtgggtcatattgccaaagctttggctcttggagcttctacagtcatgatgggctccctcttggctgccaccaccgaagcccctggtgagtacttcttctcagatgggatccggctaaaaaagtaccgtggtatgggttctcttgatgccatggacaagcatctcagcagccagaaccgatatttcagtgaagctgacaaaatcaaagtggcccaaggagtttcaggagctgtgcaggacaaagggtctatccacaagttcgtcccttatttgattgctggcatccagcattcctgtcaggacattggtgccaagagtttaacccaagtcagagccatgatgtactctggggaactcaagtttgagaagagaacatcctcagctcaggtggaaggtggtgtccacagccttcattcgtatgagaagcggcttttctgaaaagagatccagtatatgccttgaatttttcaataaaagttttg

SEQ ID NO: 4160 - DNA, 1400 bp, Cricetinae gen. sp.
tcccttcacagagcagtagaaagcagttccaaccgtgctgactacctgttaccaagtcagtcaggaggtaggacctctacgttagacgccatgttgtcatttaacatgtattgctagccttaaggaagcagccgagagaagaactgaagtttcttactcatgtgattttaaatggagttcaaaggttgtcgttgagttctgactgcagggacgaacagtattgatgtggtgaggacgacagagtctgcagaatcagtgttcgtgattgtgtttgcgtacgtggtagcaactatgaaggatctataggaagcgttatgtctcctttggccttaagcaagacctgtgtgctgtaagtgccattctcagtatttcaaggctctaactgccttcattcagtgtgtggcctacaataactagcatttgttgatttgtttgatgtttcaaaattcccaaacaaaactcaaaaccactgactctgtcagagaagctgaagcactgggacatctcataccttggttcctcagtattcattttacgttgattgactttcggaaatctctacagaaacaaaagggaaattctctaaactacttaatccatgtactttcgtgtcagacatggataagccattagtatttggcttacaaccatttccaaatgttagttattacggacccagttgatgaacaacattagctgatttttacctatcagtattattttatttcttttagtttatagatctgtgcaacatttttgtactgtatgtcttcaagcctggcagtattaatacccttcttactgacacgtacttttagttttagaaaacttttatatttatgtgtcttatttttatatttctttatttattacacagtgtagtgtataatactgtagtttgtattaatacaataatatattttagtatgaaattttggaaagttgataagatttaaagtagagatgcaattggttctcgtgcattgagatttgatttaacagtgttctgttaacatttatactcgccttgggctgtagagcagagtttaaatgggaatgtattagttttacaactacaatcaagtcattctccctttacccagtttttaatatgaaactcttcactttgaaactcactgtgtgactcatagcatgatgctctgcagttcttctgttaagagttggcccagccataacccattcccttagcaagccaaattagaattgccttctgtaaacagtgttgggaacaatgtttaacatgttgtgccaatttgttcctgtatccatgtatgtaagctaccaatccgactcttccttttaagttccttgttacaccatggtcattttctagttttttaccagactccccagctcacaataaaatgcatcaacaagcc

SEQ ID NO: 4161 - DNA, 600 bp, Cricetulus griseus
tgcagctgaatgtcactgaggagaaggtgcctttcatttttaacatcaaccccagtacaactaacttcaccggcagctgtcatcctcaaactgctcaacttaggctgaacaacagccaaattaagtatcttgactttatctttgctgtgaaaagtgaaagccatttctatctgaaggaagttaacgtcagcatgtatatggctaatggctcagttttcagtgttgcaaataacaaccttagcttctgggatgcccctcttggaagttcttatatgtgcaacaaagagcaggttgtttcagtgtctagaacgtttcagataaacacctttaacctaaaggtgcaaccttttaatgtgacgaaaggaaagtatgccacagctcaagactgcagtgcagatgaagacaacttccttgtgcccatagcggtgggagcagctctggcaggagtacttgctctagtgttgctggcttattttattggcctcaagcgccatcatactggatatgagcagttttaggacctgcaatccaattgattatattataaaatacattcaaagaacgaggttttcttgcctgtcagtgctccttaaaacacac

SEQ ID NO: 4162 - DNA, 600 bp, Cricetulus griseus
ccagcagaaagaactggagaaggtctgcaaccccatcattaccaagctgtaccagagtgctggtggcatgcctggaggaatgcccgggggcttccctggtggtggagctcctccatctggtggtgcttcttcagggcctaccattgaagaggtggattaagtcagtccaagtagaggtgtagcattgttccacagggaaacatttgaaggacccaaatttgcaaagtttcatggcagtttttaaatttaaactgttaacaataaattactgggcattctcaatacttgaacatggaacatgtacacaggaaataaaacattgcactttataagcactgtatcctaagtggaaaacgcaatgtctaatatggtggaaaatggaatgtctaaataaaactatttaaattggcaccatacagttgtcctgactaactttggaattaagggtggcttttgtcaaggaacaaattaacaaatgcaggaatgagagatactaccctaacacaattctagtaccctccagtgggtttttcagcttagccttaggctaagaaccaacatgagttcaaagctgaaggtgctgggtaaattctctgaaaa

SEQ ID NO: 4163 - DNA, 600 bp, Cricetulus griseus
caccaagctgggccgtctggttaaggacatgaagatcaagtccctggaggagatctacctgttctccctgcccattaaggaatccgagattattgatttcttcctgggcgcatccctaaaggatgaggttctaaagatcatgccagtgcagaagcagactcgggctggccagcggaccaggttcaaggcttttgtcgctattggggactacaacggtcatgttggtcttggtgttaagtgctccaaggaggtagccactgccatccgaggggccatcatcctggccaagctttccattgtccctgtgcgaagaggctactgggggaacaagattggcaagccccacactgttccatgtaaagtgacaggccgctgtggctctgtgttggtgcgtctcatccctgcccccagaggcactggcatcgtctctgctcctgtgcctaagaagctactgatgatggctggtattgatgactgctacacgtcagccakgggctgcactgccaccctgggcaactttgccaaggccacctttgatgccatctccaagacctacagctacctaacccccgacctctggaaagagactgtgttcaccaa

SEQ ID NO: 4164 - DNA, 1400 bp, Cricetinae gen. sp.
cggaagtgataaagaccatgcaaaaaaaagctgcagatggagataagattactacagttattcagcatgtgttccagggccttattttgggaagtaaaaccaactgggcagaggattctggcctcagggaaattgtgctgcagctggagaaggatctcaccacaatctaataagaatcctgctctggcatgggagcctgtttgtgcccactctgcctttgaaatagcagagtttgtgggaatgcaagaagtggttcggaaccattctgatgcttcgattccagggcttgggttgatgataggacatgaaatctcttgtctgaaatacgatcactaaagtgactggcatactctgcgggagtctaaacactgtagccttggaaagaaggcatctggtccagctgcggtcgagtgtgcacatcttcacaacaacacaaccatttcctttcagtgtgctctcatgcatctgtgcattggtttgtcaaccaacacattggaaaagcatccaaagggtaagggtagtgattgtttaagtacagttgtgggttgtgactttttcttccgttctctgtttagcatgtattttacttttataagtttatgaataaaaagggatttcagattgaggagaccatagaccgagagacttcagggaacttggagcagttgctcctggctgtggtgaagtctattcggagcatacctgcctaccttgcagagaccctttactatgctatgaagggtgctgggaccgacgatcacaccctcatcagagtcgtggtgtcgaggagcgagattgatctgtttaacatcaggaaggagtttaggaagaacttcgctacctctctgtattctatgatcaagggtgacacatctggagactataagaaaaccctgctgctgctctgtggaggagaagatgactgagggattggctgtctggagtactctgcctgccgcctccagcagcttccttcagcaaatgcagccatgcttatatttctcatgcctgactggatgccttactcacactagtatgctaatgaccaaatgtgttgccttactgcactagtatgttaacaactaaatgtgtcatagatgacattagtggcacatccttctgatcttcctgttgacattagtgcttaccttcacttgtctctaagtctaatgtctgaattatcaatactgtctataaagaggtcagattgctttttataacattttttttaaagcttcatttatattaagttaataaccatattaccttgattggaaccttagccatgaaattgtgaactcctggaaatactgtcaatcaagcttactgctctatcagacctgtaaagttatgatagttgtatcaaaaatgatgaatgacaaataaacattcccttcccg

SEQ ID NO: 4165 - DNA, 1400 bp, Cricetulus griseus
  misc_feature (339)..(344): n is a, c, g, or t
caktgagacaggcgctggcaagcatgtgccccgggcygtgttcgtagacctggaacccacagtcatcgatgaagttcgcactggtacctaccgccagctcttccaccctgagcagctcatcacaggcaaggaagatgctgccaataactatgcccgtggccactacaccatcggcaaggagatcattgatcttgtcttggacagaattcgyaagctggctgaccagtgcacaggtcttcagggcttcttggttttccacagctttggtgggggaactggctctgggttcacctccctgctgatggagcggctctctgtcgattatggaaagaagtccannnnnnagttctccatctacccagccccccmggtttccactgctgtggttgagccctacaactccatcctyaccacccacaccaccctggagcactctgattgtgccttcatggkagacaacgaggccatctatgacatctgtcgtagaaacctcgacattgagcgccccacctacactaacctwaaymgsytsatwrgycarattgtgtcttccatcactgcttccctcagatttgatggagccctgaatgttgacctgacagaattccagaccaacctggtaccctaccctcgcatccatttccctctggccacatatgcccctgtcatctctgctgagaaagcctaccatgagcagctttctgtagcagagatcaccaatgcctgctttgagccagccaatcagatggtgaaatgtgaccctcgccatggtaaatacatggcttgctgcctgctgtaccgtggggatgtggttcccaaagatgtcaatgctgccattgccaccatcaagaccaagcgyascatccagtttgtggactggtgtcccactggcttcarggttggcattaattaccagcctcccactgtggtacctggtggagacctggctaaggtccagagagctgtgtgcatgctgagcaacaccacagccattgctgaggcctgggctcgcctagatcacaagtttgatctgatgtatgccaagcgtgcctttgtgcactggtacgtgggtgagggcatggaggagggggagttctctgaggcccgtgaggacatggctgccctagagaaggattatgaggaggtgggtgtggattctgttgaaggagaaggtgaggaagaaggagaggaatactaaattaattgtcacaaaggtgctgcttttacagggaagtttattctgttccaacaaagaaagctgtggtctgatcagttaatttgtatgtggcaatgtgtgctttcatacagttactgacttatggttgaaaatatgaatgacttgtcatagacccaagccgtccatttcactgatgggttttaaataaaatattccctgtctt

SEQ ID NO: 4166 - DNA, 600 bp, Cricetulus griseus
  misc_feature (346)..(371): n is a, c, g, or t
  misc_feature (535)..(555): n is a, c, g, or t
ctgtctgaggataccactgaagagaccttaaaagaatcatttgagggctctgttcgtgcaagaatagtcactgatcgggaaactggttcctctaaagggtttggttttgtagacttcaacagtgaggaagatgccaaagctgccaaggaggccatggaagatggagagattgatgggaataaagttactttggactgggccaaacctaagggtgaaggtggctttggtggccgaggtggaggcagaggaggttttgggggccgaggtggtggaagaggaggaggccgaggtggatttggcggcagaggccggggcggctttggaggtagaggaggcttccgaggtnnnnnnnnnnnnnnnnnnnnnnnnnnagacttcaagccacaaggaaagaagacgaagtttgaataattccttcccaatctttcccacttcgttttaaagaaaggactctggggttttacactgttacctgttaaatgacggagccttttaaggacatttcaagagattttttttcctacaaatattttgnnnnnnnnnnnnnnnnnnnnncgttgggggttgtaaaagaatgtttatcatgttttttttagctaa

SEQ ID NO: 4167 - DNA, 600 bp, Cricetulus griseus
gaccaaaatcgcctgacacctgaagaaattgaaaggatggttaatgatgcagagaagtttgctgaggaagacaaaaagctcaaagagcgcattgataccaggaacgagttggaaagctatgcttactctctcaagaaccagattggagataaagaaaagctgggcggtaaactttcctctgaagataaagaaaccatggagaaagctgtagaggaaaagattgaatggctggaaagccaccaggatgcagacattgaagactttaaagctaaaaagaaggaactagaggaaattgttcagcctattattagcaaactctatggaagtgcaggccctcccccaactggtgaagaggatacatcagaaaaagatgagttgtaggtgtactgatctgctagggctgtaatattgtaaatattggactcaggaactttcgttaggagaaaattgagagaacttaagtctcgaatgtaattggaatcttcacctcagagtggagttgaaaatgctatagcccaagtggctgtttactgcttttcattagcagttgctcacatgtcttggggttggggaaaggaggaattggcaatttttaaaatt

SEQ ID NO: 4168 - DNA, 1400 bp, Cricetulus griseus
ttgtacctgctcttgaaattgctaatgctcatcgtaagcccttggtcattattgctgaagatgttgatggagaagctctaagcacactggttttgaacaggctaaaagttggtcttcaggtggtagcagtcaaagctccaggttttggggacaataggaagaatcagcttaaagatatggctattgctactggtggtgcggtgtttggagaagaggggctaaatctaaatcttgaagatgttcaagctcatgacttgggaaaagttggagaggtcattgtcaccaaagatgacgccatgcttttgaaaggaaagggtgagaaagctcagattgagaaacgaattcaagaaatcactgagcagctagaaatcacaactagtgaatatgaaaaggaaaaactaaacgaaagactcgctaaactttcagatggagtagcagtgttgaaggttggaggaacaagtgatgttgaagtgaatgagaagaaagacagagttacagatgctctcaatgctacaagagcagctgttgaagaaggcattgttttaggagggggctgtgctctgcttcgatgcatcccagccttggattccttaaagccttctaatgaagatcagaaaataggtatagaaattattaaaagagcactcaaaattcctgcaatgacaattgctaagaatgcaggtgttgaaggatctttgatagttgagaaaattctgcagagttcctcggaaattggttatgatgctatgctcggagattttgtgaacatggtggaaaagggaatcattgatccaacaaaggttgtaagaactgctttactggatgctgctggggtggcctccttgctaactacagcagaagctgtagtgaccgaaattcctaaagaagagaaggaccctggaatgggcgcaatgggtggaatgggagggggtatgggaggtggcatgttctaattcctagaatagtgctttgcccttatcaatgaactgtgacaggaagctcaatgcaggttcctcggtgataacttaagagaagtcacctgaagaaaatgaagagaaggctggctgatcactataaccatcagttactggttcccattgacaatacataatggtttactgctgtcattgtccatgcctacagataatttattttgtatttttgaataaagacatttgtacattcctgatactgggtgcaagagccatataccagtgtcctgctttcaacttaaatcattgaggcagttctactattctgttacagtcaggattctagtgcttgcgtgaccagatgagttcagaagcagcctttctgtggagagtgagaataattgtgtacaaagtagagaagtatccaattatgtgacaacttttgtgtaataaaattttgtttaaaag

SEQ ID NO: 4169 - DNA, 1249 bp, Cricetinae gen. sp.; identical to SEQ ID NO: 527

SEQ ID NO: 4170 - DNA, 1400 bp, Cricetulus griseus
tgcctgtgaacgggcaaagcgcaccctctcctccagcacccaggccagtattgagattgattctctctatgagggaattgatttctatacctccattacccgtgctcgattcgaagaattgaatgctgacctgttccgaggcactctggaccctgtagagaaggcccttcgagatgctaaactagacaagtcacagatccatgacattgtcttggtgggtggttccaccagaatccccaagattcagaagcttctgcaagacttcttcaatggaaaagaactgaataagagcattaaccccgatgaagctgttgcttatggtgcagctgtccaggcggccattctatctggagacaagtctgagaatgttcaggatttgttgctcttggatgtcactcctctttcccttggcattgaaactgctggtggagtcatgactgtsctcatcaagcgcaataccaccatccctaccaagcagacgcagactttcactacctattctgacaatcagcctggtgtgctcattcaggtctatgaaggcgaaagggccatgaccaaggataacaacctgcttggaaagtttgaacttacaggcatccctccagcaccccgtggtgttcctcagattgaagttacttttgacattgatgccaatggcatcctcaatgtctctgctgtagataagagcacaggcaaggagaacaagatcactatcaccaacgacaagggccgcttgagcaaggaggatattgaacgcatggtccaggaagctgagaagtacawagctgaagatgagaagcagagagataaggtttcctccaagaattcactggagtcctatgctttcaacatgaaagcaacagttgaagacgagaaacttcaaggcaagatcaatgatgaggacaaacagaagattctagacaagtgtaatgaaatcatcagttggctggataagaatcagactgcagagaaggaagaatttgaacaccagcagaaagaactggagaaagtctgcaaccccatcattaccaagctgtaccagagtgctggtggcatgcctggaggaatgcccgggggcttccctggtggtggagctcctccatctggtggtgcttcttcagggcctaccattgaagaggtggattaagtcagtccaagtagaggtgtagcattgttccacagggaaacatttgaaggacccaaatttgcaaagtttcatggcagtttttaaatttaaactgttaacaataaattactgggcattctcaatacttgaacatggaacatgtacacaggaaataaaacattgctctttataagcactgtatcctaagtggaaaactcaatgtctaatatggtggaaaatggaatgtctaaataaaactatttaaattggcacc

SEQ ID NO: 4171 - DNA, 1400 bp, Cricetulus griseus
tgcagggttagctactgccatcctacagtctcaaaagcgcccccttaaggggccagataaaagaacttgctttakatgtggaacaattggacatattatggcagatggcccaactaggctgtgagcagaagctccccggcctatatgtcacctccatccaatatgaaaattttaccaaagcagctaatttgtctaaaagcctttctcagttcatgttacagaattggacctccaaatttgagcaaacgcttcgggagttgagagccgctattatccagattaactccacgcgccttgacctgtccttgacggagggattgtcatcatggatcgcttcrrctgtctcctattttaaggaatgggtgggggtgggattgtttggtgcakccgtttgctgcggattggtgttgcttctatggctggtctgtaggctcagggctcaaactaagagagacaaggtggttatcgcccaagcgcttgtagctttggaacaaggggcttccactgacatttggttaacaatacttaagcaataggccgctggccagacagctcttgcacacccggagcctargctcattgcacagggtagagtgtctggcttgagcagcccatgagggatgtggagcaaggcatcgcacagaagagttgcccagtatgcaggcttctctgggaggcatgttgtcctgcataagggttgcctgccctagtctccctttcccagaaaaacggcagaggacaggtcgagagcgcttcgggtcaagctaacagcctaatggcgactctcgtacacagtcttaatgtttgattgggaaggtacaacctctgcctctatccctcaacatatgggtgacctatttgcttgtaaaaatatgaagccttatcattaattaataaaaaagggggagatgtagggagccgtccctgcattctctattacaagatggcgcctgcatccggcaggcaccgaatggtawacaagktaatgcgcargtgctgggtaactttccatcccttggtctctgcctctyccgtggcgtcatatggtccgatgagctgcagccagtcagggggtgacacgtccgaggcggtggttgccagcctatataagggatgggtttttgggagttcggggtctctgctctgtaagcttatgctctccctctcaagatgcattaaagctttactacagaaggatcctgaatgtcctgcgtcattcttgctggcgagacggtagcgcgggacagatggtgacagccggtgcagaaagtgtcaacctcagcttccttctccaggaagacttcagcctgggactgctcctctacagagccccctaccaagattatctaacctgcctgccttcttgttgagctgtgtgtaataaactcattgagtttccc

SEQ ID NO: 4172 - DNA, 600 bp, Cricetulus griseus
atcatctctatagatattaaagattgcttcttttccatacctttgtgtgccaaggattcagggcgttttgcgtttacgctgccctcttgtaatcatgaacaacctgatttaaggtatgaatggatagtgttgccacaggggatggccaatagtcctactatgtgtcagttgtttgtagcagaagcaattgctcctttgagagtggactttccaaagattagatgtgttcattatatggatgatattttattggctgccaaagatgataaaacgcttaataaggcatatacaaaattggtaaaattgcttgagatgcataatttagtcatagcctcagaaaaggtacaaaaggacactgttgttaactatctaggggctaagattctccctcatacaattattccacaaaagatagagattagaaaagataatttaaaaactcttaatgattttcaaaagttgttgggagatataaattggataagatgttatttaaaattaccaaattatgagttgaagccattgtataatattctcaatggtgattcagcattagattcacctaggcagttaactgctgaagccagagaagctttaaag

SEQ ID NO: 4173 - DNA, 1400 bp, Cricetinae gen. sp.
agctggtcactcgggaagggaatgagctctaccactgtgtcatctacctggcccccggagactatcactgcttccactcccctactgactggactgtctcacatcggcgccacttcccaggttccttgatgtcagtgaaccctggcatggcccgatggatcaaagagctcttctgtcacaatgagcgtgtggtgctgagtggggactggaaacacgggttcttctcattgacggcagtgggcgccactaacgtgggctccatccgcatctactttgatcaagacctgcacacaaacagtcccagatacagcaagggttcctacaatgacttgagctttgtaacacatgccaacaaggagggcattcccatgcgcaagggcgagcacctgggtgaattcaacttgggctctactattgtgctcatctttgaggcccctaaggacttcaacttcaggctgaaggcagggcaaaagatccgctttggggaagcgctgggctctctctagtcgtcttggttgtggctgccaagggatctttccacgcagaagcatgagagtcttcagagacactcctgactgtcctggtgagaggactgtgggactggccaagtaggacctgaatgatttgttcccgcctgcccagaggtgcagagagaggttttggatttgtcaggacctagtgggtatgatttgaccctacatctcctggctgagcattgtgagaacagttatgcactaccacaccctctagttgctctccccagctgtctcagggcctttttctgtcagcccttctgttctttctgccttagcatctctgtctcccctcactgtgcacaggacgaggtgcttccttggcacagacctcttagaggaggccccatggccttcacaactgctttctgttcccagttcaaccctctgcttgctggaaaagtaaaatcatttatgttgttgaatgtgttgacctagattctgccagtgtcttctgaggtctgaccttccaaggctggctgagccctttttgctagggcaagaccaatcactgacttgcctggtagtgtccggagtggaggcccagccctgcaggaagtgtaggagacatgctgctattggtctaggggctgtgttggaggcagagggtgtggtggtcagtacttagaaaacctgttccaagtgactgcgggtattcaggccattaggatcccagtaatagggacaaggccagatttcatgttgatcttggggatgccatggatttctcctgcaggagaaattattgaactttgatttcaactgtatcagtagtacagtattttgtatgaaaagtaggagtcttctgaacagtaattcatttcattgcaagacattttgaaataaaaaagacaaaacaccattgta

SEQ ID NO: 4174 - DNA, 600 bp, Cricetulus sp.
  misc_feature (505)..(555): n is a, c, g, or t
agagctggacaggcactttctgggtcctttccaattccccatgttaggtcaaggtcccctctttatctgatacccttaagggacaacatactctgaagtaagtttctgtacagtgatacatttctgtgcatccttcctcttacctcttacactatcctgaaaatcctttgactatcataagacccttgtctgtcccgttccatactcccccactgatgctaatatacacttgatatcaaactgtcagcctaccaaaaagatattgtggcttatgggtattgctgtcttgttcttggtatgttcctatactgattgcccctcagtctgaaaaaaaatgctcattgtaagcctaaaactagatgattttgctttcccactcactgttttttctttccttctgcttgttgtaagaatccaatgaaataatgtatgtaaaagcaccttgtaaactgtaagctttcggtgtaagatgtaaggtgtgttgttttttcattaattctttgtnnnnnnnnnnnnnnnnnnnnnnnnnnnnnnnnnnnnnnnnnnnnnnnnnnngttttttaattcatcaataaccgcaaaattaaagtatctttaaag

SEQ ID NO: 4175 - DNA, 843 bp, Cricetulus griseus; identical to SEQ ID NO: 533

SEQ ID NO: 4176 - DNA, 600 bp, Cricetulus sp.
ctgctccaccattgggcttaaccagcccagcacaccaacccatgccgctagcatctgagcctttgggaagcagcaaagaggaaatcctctkcccagtggcatgccatgttgctttcamgcctctcccatgcttgtctctgttcagacgtgcatctcatctgtgacaaaggatgaagaacacagcatgtgccaaattgtacttgtgtgtgtcatttttaatatcactgtctttatcactatggttactcccctaagtgattggctttgtgcttggggctatatgtatgttgatcaaacacataccaggctgaactatagtgaaaccctggtgaccagggtggtcattcttattgatgtttgcactgctgttcatgttccgtgactcactggctggctgcctctattgtcaggattctcggacccttggtacttcactcttgctggtgacctctcagtctgaagagagggagcttggtgagacccttcacaggcagtgcatgggaagcatgctttgctgctactgaaatgagcatcagattgtgtacatcatgttatttttatgttttgcttttgatatagaactcagcaattcccatcaaa

SEQ ID NO: 4177 - DNA, 600 bp, Cricetinae gen. sp.
agatccggaaatctccttagctgactattggaaatgtacctcctgcaatgaaatgaatcctccccttccacctcwctgcaacagatgttggacyctkcgtgagaaytggcttccrgaagataargrgaargataraggggacrysyctgaagargccaarctggaggcagaaggcttagatgtgtcctgatggggaaaaaagctacakcgartgattstaaggagtcctgcactgaggarartgatgataargaaatatatacctcccagtcrcaagagagtgaggactattcccagccstcaacktccagcagcattgtttatagcagccargaagaygtcaaagagtgggagaaggaagagacascagacaaagargagartgtggaatctggcttctctcttaatgccattgaaccatgtgtgatttgccaagggcggcctaaaaatggttgcattgttcatggcaaaactggacatctcatgtcatgtttcccatgtgcaaagaagctaaaaaaaaggaataagccctgcccagtgtgcagacaaccaatwcaaatgattgtgctaacttattttagctagctgacctgcccataa

SEQ ID NO: 4178 - DNA, 1400 bp, Cricetulus griseus
gggcttggtctacctccttccacctttgtctctttctcccaggatcttccctctgtctctcagactgtctccccatctgtttttctcccttctccaagagttgtgaggatgaaggcaagactgactttctgagttgtcacctgccaaggcttttggatcatttcagcccagtaggaccatgggcaagtctccttaagactgctgtggtaaatgtccatggtctaagcccaagtgggctgagaagaaaagtggcctgagcaggaatggggtgatctcctcacttgaaagcaacatagggtgctgccaaagccccttccccagccctctggagacctgagtgtctcactttctgcctctttgttttttttgttatgttttgtttttatcaggctttctctgggaactaggtctctgtgcaccagagaacattttgcattctggacttatctggcatgcccccttttatacaaatgtttttatatgtgtgcttgggcctgtcacaatacagggcaaagttgctgtggcatctttatttctcctgggtctgcactccttccactgtgcctgactaagcctgttcattgttttctcatcatcacaagggacagccagggaaggaagggagcccagtcctggggaggtgggtgggaggcaagggcaggtcttgggatggatgaaataatgttggcattgttttttaattttttaaaaaataaatggtatcttacttaattgtcctgttccttcccactcctccaccccctgagagggcaacctgagctcagggtaggcccaaggggctggataggatgaagccacctttggacctaggatccaggggtcttcagcatgatttatttgttccttcctacccctagcctaactcctacctcccatagagtgtatttttatccttaattcctgcctgtgaataggccagggtgacagacactggtccaagccctccccagcagcaagcctctcttttttcagggtaggcagcaggaatcaggtctcctccttgagatgggggagtcctaggaagagagtggtcctgcttttctggactgcttggttcagggcttcctgggagacttgcgaggaaccttccttgtgcttctcatccctctaagctggttgaagcagagagtaggcaggggtggccccttcctgtgcttggtccccacctgtcctatcctgtctatcactgtaatttatggtcccgctgatggggcagcccagcccttgtgtctcgtgtatatactgtgccttttctctttgttgggggtgggagggtggtttttcactgaacaggggatatacctatgtcttccttgatgttgcaacattcaccatgtgctggacataggttactcaataaacacagattggtaccacct

SEQ ID NO: 4179 - DNA, 1124 bp, Cricetulus griseus; identical to SEQ ID NO: 537

SEQ ID NO: 4180 - DNA, 600 bp, Cricetulus griseus
  misc_feature (144)..(170): n is a, c, g, or t
ggcaccaagatgggcctcatcttcgaggtggcggagggcggtttcctggacatcgacgtggagatcacaggaccagataataaaggaatctataaaggagatcgagagtccagtgggaaatataccttcgcagcccacatggannnnnnnnnnnnnnnnnnnnnnnnnnntaggatgtccaccatgactccaaagatagtaatgttcaccattgacattggggaagctcccaaaggacaagacatggagacagaagctcatcagaacaagctagaagaaatgattaatgaactggcagtggcgatgacagctgtaaagcacgaacaggagtacatggaagttcgggagagaatacacagagccatcaatgacaacacaaacagcagagtggtcctttggtccttcttcgaagctcttgttctagttgccatgacattgggaymgaycyactmcstgaagagattttttgaagtccggagggttgtttaaaaggccttttcctgttgatcccaaattcacaattcasttgtttaccaaacaccttggycataataatgtcattmgttgatacatttttattttccgatcgttcatgactta

SEQ ID NO: 4181 - DNA, 600 bp, Cricetinae gen. sp.
ccttctggatccgcctcatgagtacccgttcgtgtggatgatgtccccaaggtccaagtcaccacatgagaaagtgagccagatcagaaacttcagagaaagggctttcccaaagtggtgagaatctccagaaagatccctgaactccatgtcctgagtctataagcatgctgacttttctgttgaagtttacaataaaaggaagccaacggtgatatttacattgtcaccagggattaaaggactgtggcacacaggtacttggagaacatccagcacaggccctgcagctacacgggaagctgcaggatggagtccagtcccatcagagaggctgtgctccaggctgcctcctcacttgtggaggcgctgagccgacgctggctatcctgatgtgttcagcgtttcacggaaacttcctttttgctcaaagaaaggaaggaactcacatgtataactgttacattcttgttttagactggatctattaactctaaccaaatgtagcatgtgatgatattttaaagtgtgttccatgtatcaattttataagagtttgtcacatttttctttcaaaacataaactcagatttaaaatta

SEQ ID NO: 4182 - DNA, 1198 bp, Cricetulus griseus; identical to SEQ ID NO: 540

SEQ ID NO: 4183 - DNA, 1181 bp, Cricetulus griseus; identical to SEQ ID NO: 541
  misc_feature (1096)..(1096): n is a, c, g, or t

SEQ ID NO: 4184 - DNA, 1400 bp, Cricetulus griseus
  misc_feature (89)..(114): n is a, c, g, or t
  misc_feature (183)..(233): n is a, c, g, or t
  misc_feature (680)..(724): n is a, c, g, or t
agaaaatggcctgaacggctttcagctctggataatctcctcaaccactccagcattttcctcaagggtgcccggctcatcccagagannnnnnnnnnnnnnnnnnnnnnnnnnatgacaacgttagagaaagtcatcaatgacacctgggcctggaagaatgcaactctggctgagcaggcnnnnnnnnnnnnnnnnnnnnnnnnnnnnnnnnnnnnnnnnnnnnnnnnnnncaagatgatggccctggaccgtgaggtacagtatctgctcaataaggccaagtttaccaagccccggccacgacccaaggacaagaatggcacccggacagaacctcccctcaatgctactgctggtgaccaagaggagaaggtcattccacctgcaggtcagcctgaagaggcaaagcccattttagaacctgacaaagaagagactactacggaaccaacagactctgagcctctggaattaggaggtcctggagcagaatctgaaccgaaagagcagacagcaggacagaagcggtcttcgaagaatgatgaactataacccccccctcctgtatccccactgtstsgcctscagccccttctcctaccacctctatttattatacatcagggttggggcaaggggtgggttttgcccttagggsstcaagttccttctctcannnnnnnnnnnnnnnnnnnnnnnnnnnnnnnnnnnnnnnnnnnnncatgagtgaaatgatctagttctgtccccagctccacgctctggtctcctactctctggccctgtgtttgggaaaaatcactattgtgtcttaattgtttgcctgtgggtaaatgagagaatggctgsccggttgttggagacctggtaatgggaaggatattttgggacactagagtgcccagtcttctctgagtatcatttcattctttgctgttccacaaaatcagtgtcctgtttgggccagtgtctacagagcctcatcaccacctttggcttcccagtgcctctttttctcttctgtgtcttctctttcccctgcccttcctccttggctcttctgtctgtctttgccttcccagtacagattgggcctcgtgcgaattcgccgacaccatcataaccaaagcaacatttaccaaaacatggaaataatgatagcagaaacagtcaatgagctaaatattttccttttccttttttttagatacggtctcgctctgttgcccaggctggcagtgaacttccgaggccttcggtccagatgatccatgtctacaagcttatgacactggaatttactttcaaatcaacaatcatgattgtgaaaaatcacgcattttatttttcaactcataataaaaatatgtattattagcagaatatatgtaagaaat

SEQ ID NO: 4185 - DNA, 1248 bp, Cricetulus griseus; identical to SEQ ID NO: 543
  misc_feature (1166)..(1180): n is a, c, g, or t

SEQ ID NO: 4186 - DNA, 566 bp, Cricetulus griseus
  misc_feature (415)..(455): n is a, c, g, or t
aagggacttcctgagcagaaaaggggcaaatttcagtctttttactgtgtttttgcagtattctatatataatttccttaatatataagtttagtgacaattagctaactcatttaatgggtggtaaattcagcagtagcaggttcatactgttctgtcactagcctgttattttttcagccgcatgaaaggggttgggtggggctgtataccaatcattattaaggtatatccggtttgtgctgaatggccatgttctaggtatgaaacccatcacatgcaataagactatctgtagatcctgttggccaagagtactgctataaagaatgacctatgtgtataggattggtccttcaactgaggccttgcatgacagctacctgtgccatggtttgtaggtgcaaagctaggnnnnnnnnnnnnnnnnnnnnnnnnnnnnnnnnnnnnnnnnnggggagagatgaagtctctcttggtcctaaggcatatctttctagctaccctcttggttggcctgtgtcaggaacctgtatccttgatgattgttcttttcatccattctg

SEQ ID NO: 4187 - DNA, 1400 bp, Cricetulus griseus
  misc_feature (1216)..(1254): n is a, c, g, or t
gaccttcaggccttcgtaggtccgaacgcgggaggcatagctggtctgaaaaagcatctggagtacttgagcaccctgaaggtgaagggcctggtgttgggcccaattcacaagaaccagaaggatgacgtcaatggaaccgacttgaaacagattgaccccagtttaggctcccaggaagattttaaagaccttctgcaatctgccaagaaaaagagcattcacatcattttggacctcactcccaactaccggggccagagtgcatggttcctccctgctcaagctgactgggtggccaccaagatgaaggaagctctgagttcttggttgcaggaaggtgtggatgggttccaatttcgggatgtggaaaagctgatggatgcatccttgtacttggctgagtggcagaatatcaccaagaacttcagtgaggataggctcttgattgcagggactgactcctccgacctgcagcaaattgtgaccatactcgaatccaccagcgacctgctgttgaccagctcctatctatcaaattccagttttactggggagcatacaaaattgctagtcactcggtatttgaatgccactggcagtcactggtgcagctggagtgtgtctcargcagggctcctgacagcctccgtcccagctcagctcctccgactctaccagctgatgctcttcactctgccagggacccctgttttcagctatggggatgagatcggcttgcaggaagctgtcgttcctggacagcctgtggaggccccattcatgccatgggatgaatccagcctcccccaaactccgggacacataagcacgaacatgacagtgaagggccagaatgaagaccctggctccctccttacccagttycggtggctgagtgaccttcggggtaaggagcggggtaaggaacgctctctgttgcacggtgacttccgtgcactgacctcctcacctggcatcttctcctacgtccgctactgggaccagaatgagcgttacctggtggtgctcaactttcaggacgtggtcctgtcagccaggctagaggccgccaacctccctgctggtataagtctgccagccagcgctaacctattgtttagcaccaacagtacccggctaggccaagagcagggtacttctctgagtctggaaaacttgtacctgaatcctcatgagggcttgctgttacatnnnnnnnnnnnnnnnnnnnnnnnnnnnnnnnnnnnnnnncaccctcctctcttttcccctggccttttgaattatttttttctctcctttggtttgtttgtttggtttaactttttgcagattgcatatcaattctcacactgggtgtttttggcttcaaataaaaatcacccctgcctgataaa

SEQ ID NO: 4188 - DNA, 600 bp, Cricetinae gen. sp.
  misc_feature (499)..(499): n is a, c, g, or t
  misc_feature (506)..(506): n is a, c, g, or t
  misc_feature (552)..(552): n is a, c, g, or t
ggatggtctggcmacatggagaggattatgaaggcacaagcataccaaacgggcaaggacatctctacaaattactatgcaagtcagaagaaaacatttgaaattaatcccagacatccgctgatcagasacatgcttaggarggttaaggaagatgaagatgacaagactgtcttggatcttgctgtagttttgttwgaaacagcaacacttcggtcaggatatcttctaccagacaccawggcatatgsagatagaatakagagaatgcttcgcctcagcttaaacattgaccctgaagcacaggtagaagaagaaccggaagaagagcctgaagacaccacagaagacacagaacaagacgaggaggaagaagtggatgcaggcacagaagaagaagaagaagaggaacaggaaacagcaaaggaatctacagcagaaaaagatgagttataaattatcctctcaccacagatcctgtgtggagagggaatgtganattttanagtcgtttcttttcagagagacttgtttgggatgctccccagcctncttctcccctggactggtaaatgttggggattgggggttaccaggaag

SEQ ID NO: 4189 - DNA, 723 bp, Cricetulus sp.; identical to SEQ ID NO: 547
  misc_feature (615)..(630): n is a, c, g, or t

SEQ ID NO: 4190 - DNA, 1178 bp, Cricetulus griseus
gtgaacggatttggccgtattggacgcctggttaccagggctgccttcacttctggcaaagtggamrttgttgccatcaatgaccscttcattgacctcaactacatggtctacatgttccagtatgactctacccatggcaagttcaaaggcacagtcaaggctgagaayggraagcttgtcatcaacgggaaggccatcaccatcttccakgagcgagatcccrccaacatcaaatggggtgatgctggygccsagtatgttgtggartctactggcgtcttcaccascrtssrgaargctggggcccacttgaagggyggrgccaagagggtcatcatctycgcmccttytgctgatgcccccatgtttgtgatgggtgtgaaccawgacaagtatgayaactccctcaagattgtsagcaatgcrtsctgcaccaccamctgyttakyccccctggccaakgtcatccatgacaactttggcattgbgraargactcatgaccacrgtccatgccatcackgscacccakaaractgtsgwtggcccctccsgraakctgtggcgtgatggccgtggggctgcccavaacatcatccctgcatccactggygctgccaargctgtgggcaargtcatcccadagctkaacgggaagctsactggcatggccttycgtgttcctacccccaacgwgtccgtygtggatctsacatgtcgcctggagaaasctgccaagtrtgargacatcaasaaggtggtgaagcakgcatcygadggcccwyygwwrggyatcctgkgctacaccgakgaccasgttgtctcctgcgacttcaasagtgactcccactcttccacctttgatgctggggctggcattgctctcaatgacaacttygtaaagctcatytcctggkatgacaatgaattyggctwcagcaacagrgtggtggacctcatggcctacatggcctccaaggagtaagaagcccaccctggaccatccaccccascmaggactcsagcaagarggaggccctggctgctgagcagtccctgtccaataacccccacaccgatcatctccctcacagtttccatcccagacccccagaataaggaggggcttagggagccctactctcttgaataccatcaataaagttcactgcaccc

SEQ ID NO: 4191 - DNA, 600 bp, Cricetulus sp.
cccaatctgccctacttaattgatgggtcccacaagatcacccagagcaacgccatcctgcgctacattgcccgcaagcacaacctgtgtggagagacagaggaggagaggattcgtgtggacattgtggagaaccaggctatggacacccgcatgcagctcatcatgctctgttacaaccctgactttgagaagcagaagccagagttcttgaagaccatccctgagaagatgaagatgtactctgagttcctgggcaagcggccatggtttgcaggggacaaggtcaccttatgtggatttctcgcttatgatgtccttgatcagtatcaaatgtttgagcccaagtgcctggatcccttcccaaacctgaaggacttcttggcccgctttgagggcctgaagaagatctctgcctacatgaagaccagccgcttcctccggagacctatattttcaaagatggcacagtggagtaacaagtaggcccctgctacacgggctctcatatggaggacctgtgcacactggatcctcctggccctggggacagctggtcttctgcactgctgcctcaaggttctcacttctttctccttt

SEQ ID NO: 4192 - DNA, 515 bp, Cricetulus sp.
  misc_feature (54)..(76): n is a, c, g, or t
  misc_feature (129)..(163): n is a, c, g, or t
  misc_feature (192)..(227): n is a, c, g, or t
  misc_feature (333)..(365): n is a, c, g, or t
tgcmkawyttcgtgaagaccctgacyggcaagaccatcaccctagaggtggaannnnnnnnnnnnnnnnnnnnnnngaaggccaagatccaggataargagggcmtcccccccgaccagcagcgactcnnnnnnnnnnnnnnnnnnnnnnnnnnnnnnnnnnntctttctgattacaacatccagaaagagnnnnnnnnnnnnnnnnnnnnnnnnnnnnnnnnnnnnctattaattcttcagtctgcattcccagtgggcaatggatggcattaatctgcactatagccatttgccccaatttaagtttagaaaatccaagtttcagtaatannnnnnnnnnnnnnnnnnnnnnnnnnnnnnnnnttgttgcatggtaagcatacatggtgtcatttgtgaagtttctatggtggcttgggtgggggacttcccctactgtctttagagattggtatttaactaaaatttgcgtcacttatgtcttagctgagttgggaacttcgtttaaaagtt

SEQ ID NO: 4193 - DNA, 1400 bp, Cricetulus griseus
ccgaatctctgtgtactacaatgaasscacaggtggcaagtatgtccctcgggccatattggtggatctagaacccgggaccatggactccgttcgatcaggtcctttyggccagatcttcagaccagacaactttgttttcggtcagtctggggcaggcaacaactgggctaagggtcactacacsgagggagctgagctggttgactcygtcctggaygtggtkcggaaggaggcrgaragctgtgactgcctgcagggcttycagctgacccactcvctgggyggaggyaccggttcyrgtatgggcaccctggctcatcagcaagatccgmgaagaataycccgaccgratcatgamyaccttcagygtsgtaccytcwcccaaagtgtcygacaccgtggtggagccctacaaygccaccctgtcygtscatcagctggtggagaacaccgacragacctactgcatcgacaacgaggccctstacgacatcctgcttccgcackctmaagctcaccacgccsacctayggrgacctsaacmacctsgtctcggccaccatgagcggggtcaccacctgcctccgcttcccrggccagctcaaygcygacctccgraagytggcsgtcaacatggtscccttcccmcgtctccacttcttcatgccyggcttygcccctctcaccagccgygggagccagcagtaycgggccctcacygtgccygarctcacccagcaggtcttcgatgccaagaayatgatggcmgcctgtgacccccgccacggccgmtacctcaccgtggckgccgtcttccgygggcgsatgtccatgaaggaggtggacgagcagatgctsaacgtgcagaacaagaacagcagctacttygtmgagtggatccccaacaacgtcaagacsgcygtctgcgacatcccrccrcgsggcctcaagatggcmgtcaccttcatyggmaacagcacggccatccaggagctcttcaagcgyatctcsgagcagttcacsgccatgttccgccggaaggccttcctscactggtacacsggcgagggcatggacgagatggagttcactgaagccgagagcaacatgaacgacctcgtctccgagtaccagcagtaccaggaygccacygcggaagaggaagaggatttcggggaggaggcagaagaagaggcctaagscagasagagagagccctgcgtcttctcctcaggctrcttaagttccctcagctytcttcagctgcccgtttttctccttcagagttttctyttctgctgcctctgtcctgtttttttatttttttccatcggagggggggtaaacagtgcctggcacatagtaggcgctcaataaatatttgtttgtggaatgtc

SEQ ID NO: 4194 - DNA, 600 bp, Cricetulus griseus
catgatggctgcctgtgatccccgccatgggcgctacttgacagtggctgccgtgttccggggccgcatgtctatgaaggaggtggacgaacagatgcttaatgtccaaaacaagaacagcagctactttgttgagtggattcccaacaatgtgaaaacagctgtctgtgacattccaccycggggcctaaaaatgtctgccaccttcatcggcaacagcacggcaattcaggagctgttcaaacgcatctcagagcagttcacagccatgttccgacgcaaggccttcctgcactggtacacgggtgagggcatggatgagatggagttcaccgaggctgagagcaacatgaacgacctggtgtccgagtatcagcagtaccaagacgccacggctgaggaggagggagagtttgaggaggaggcagaagaggaggtggcctagagctgttttaagcagtctaaagcatgggagcagtgtgaactctttattcattcacagcctgtctgctagccatgtccactgtgcatttgctgtcctgtcctgacatcacttgtacagataccaccattaaagcaattcatagcaaaaaaaaaaaa

SEQ ID NO: 4195 - DNA, 1400 bp, Cricetulus griseus
  misc_feature (1108)..(1136): n is a, c, g, or t
tgctggatgtgattcgcaaggagtgtgaacactgcgactgcctgcagggcttccagctcacccactcgttgggcggckgcacaggatcakgcatgggcaccctgctcatcagcaagatccgggaggagtacccggaccgcatcatgaacaccttcagcgtcrtgccgtcgcccawrgtctyakacaccgtggyggaaccttacaatgccacattgtcggtacaccagctggtagagaacactgacgagacctactgcatcgacaacgaggccctctacgacatctgcttccgcactctcaagctgaccacacccacgtacggggacctcaaccatctggtgtctgccaccatgagcggtgtcaccacatccctgcgttttcccggccagctcaacgctgacctgcgcaagttggctgtgaacatggtgcccttcccacgcctgcacttcttcatgcccggcttcgccccactcacagcccggggcagtcagcagtaccgtgccctgacagtgcccgagctcacacagcagatgttcgatgccaagaacatgatggctgcctgcgacccacgccacggccgctacctgaccgttgccaccgtctttaggggccccatgtccatgaaggaggtggacgagcagatgctggccatccagaacaagaatagcagctactttgtggagtggatccccaacaacgttaaagtggccgtgtgtgacatcccaccccggggcctgaagatggcttccaccttcattggcaatagcactgccatccaggagctattcaagcgcatctccgagcagttctcggccatgtttcgccgcaacgcttttctgcactggttcaccggcgagggcatggacgagatggagttcaccgaggctgagagtaacatgaacgacttggtgtctgagtaccagcagtatcaggacgccacggtcaacgacggggaagaagcttttgaagatgaggatgaagaagagatcaatgaatagggggcctttaagatgctatggtgcacacctgctcttagccctgatggtgtgagcacggtgccctggtctacacatcacaggcccctctcaaccaaatacacaccactgtnnnnnnnnnnnnnnnnnnnnnnnnnnnnnctttcctttaccagacaattgacagtcctaccagaccagggtgatttcatacaggaacactgaaagcaaagttagggggctgtaaaaggctgaagacagagaccaccttccgttaagtgcccagccatcagagttagcagggaagttagaataaagatttgtgtttcatccttggtgataaaatctaaagcaccgcattgttgccttaattgaatatacaatatggaactttgtgacaatccattcataataaaatgctaaacc

SEQ ID NO: 4196 - DNA, 1400 bp, Cricetinae gen. sp.
  misc_feature (1047)..(1065): n is a, c, g, or t
gtcgagggccctggatctgttctcggataatgcccctcctccagagctgcttgagataatcaacgaagacgtggccaagaagatgtgtgaggagcaccagctctgtgtcgtggccgtgctgccccacatcctggacactggggccgcaggcaggaactcttacttggaaattcttctgaagctggctgacaaatacaagaagaagatgtgggggtggctgtggacagaagctggagctcaktctgagctggagaatgcactggggattggagggtttgggtaccctgccatggcasscatcaacgctcgcaaaatgaaatttgctcttctcaaagggtctttcagtgaacaaggcattaatgagtttctcagggaactgtcttttggacgtgcctccacagcacccgtgggaggtggttcctttcctgccatcactgccagggagccctgggatggtagagatggtgagcttcctgtggaggatgacattgacctcagcgatgtggaacttgatgacctggagaaggacgagttgtgaggccacagctcagccttccaatgtcttctcttgggagcgggcagttttccggcagtgaaggctctggtcagctgtctgcccttggcctttccgagcagcacttgctggctggccggccactaaaaacactgcagcagtgaacctcggcgtctcaagaaaacactgaagaattctatgaattgtagcagtgaattggattgcgttctttggtatattttgaagcaaggtgggttgttgaaacattttccctcctgactgctgcttgaatgttcttggaagctgtttcttatatatagggtttttaaaatgtgattcctttgtttgaatattaatggctttttccattaaagaataaaatgatattttggacaatgctgataaatgtatgaaattagtggcacatcataaaatcggagtctggtggttagcctgaaaactaaccctgtgcactgatgacaccacaccacggcttcctgtaaaagtgtttttaaatatgaagataagaccannnnnnnnnnnnnnnnnnnccattaaaggctagactcacaaccaaaaatgaagacagaccttttgacaagggtgtggttctgtgtggtaaacttggtaccgagggagaccacactcatgccccaaacaaagtcttggtcttcgggcttcaccagtgacaaggaggctcaggttttcaacattctcactgatttcccattaaacgtctcatgaagaccagagccccagtggattatccaagctattttcactttgtgtaaaacgctcaggagacagtttggagttatgttaggacaccagaaaagcctcagactgaggcattttattgtaacttaaaaaaataaatacactctaa

SEQ ID NO: 4197 - DNA, 600 bp, Cricetinae gen. sp.
  misc_feature (194)..(217): n is a, c, g, or t
caagaagaagcaggactcggagaccgagcggctcaaggggacttcggagaacgaggaggaggacgacgactacaacaagcccctggacccgaactctgacgacgagaaaatcacgcagctgctgaaaaagcacaagtcgagcagcggcggcctcctgctgcacgcgtccgaggccgagggctcgtcctgagcgnnnnnnnnnnnnnnnnnnnnnnnntgctgcgggatcccgggccgccccgaccgcgcccctcagccggtcacccccgggcccagcaccgcggctgctccccgggcctttactattttctaagatgtacatatctatttttttaacccagaaatcgtggcggggcctggggggataggacggcgcgttgacgagaaggaagggagcccgccgagtgcgccgcgttaaatgacgaacccgcatccccgcggctcccctggacccttcccacccgcggtgtcagtcaatccccacccccatccaggctcggtcccttgctctgtggtccctgagctccggggttcgtgtttgtgaagagtcgacagccagcgcctggtgggaatctccgagccacacagggcatctgccac

SEQ ID NO: 4198 - DNA, 962 bp, Cricetinae gen. sp.; identical to SEQ ID NO: 556
  misc_feature (95)..(109): n is a, c, g, or t

SEQ ID NO: 4199 - DNA, 1400 bp, Cricetulus sp.
  misc_feature (411)..(468): n is a, c, g, or t
ttcaagggaaccctgggaaaaccaagaagggtgagctgagcatcatcccctatgaaatcacgctcctgtctccctgcttgcatatgttgcctcatcttcactttggcctcaaagacaaggagacaaggtatcgtcagaggtacttggacttgatattgaatgactttgkgwsgcaraaawttattgtscgagctaagatcatcacatatataaraagtttcttggatgagctgggatttctagagattgaaactcccatgatgaacatcattccaggaggagctgtggccaagcctttcatcacctatsacaatgagttggacatgaacttatatatgagaatkgctccagaactctaccataagatgctggggggggggggcattgaccgagtttatgaaattggacgcnnnnnnnnnnnnnnnnnnnnnnnnnnnnnnnnnnnnnnnnnnnnnnnnnnnnnnnnnntctacatggcttatgcagactatcacgacctcatggagatcacagagaagatgctgtcaggaatggtgaaaagcattacaggtagktacaagatcacctaccacccagatgggccmgaaggtgaagcctatgagattgatttcaccccacctttccgaagaatcagcatggtagaagagcttgagaaagcactgggtgtgaagctgccagagaccagcctctttgaaactgaagaaactcgaaaaattcttgatgatatttgtgttgcaaaagctgttgaatgccccccacctcggaccacagccaggctccttgataagcttgttggtgagttcctcgaagtgacatgcatcaatcctacattcatctgcgatcacccacagattatgagccctctggccaaatggcaccgctccaaagagggtctaactgaacgctttgagctgtttgtcatgaagaaggaaatctgcaatgcctacactgagctgaatgatcccatgcggcagcgacagctgtttgaagaacaggccaaggccaaggctgctggtgatgatgaagccatgttcatagatgagaacttctgtactgccctggaatatggactgcccccaacagctggctggggcatgggtatcgaccgagtcaccatgtttctcacagattccaacaatatcaaggaagtacttctgtttcctgccatgaagcctgaagacaagaaggaaactgcagcagccactgaaacactagaaagcacaacagccggcccctctgtctagaagataaatgaaactctggcttctctgcatttcagcagacctggtctaagtgttgccatccctctggccactgcaattcaaccaccagaagagagaagaattaaaggatttctttttattccttattaccaaataaaccatttctctctttaccta

SEQ ID NO: 4200 - DNA, 1049 bp, Cricetulus griseus; identical to SEQ ID NO: 558

SEQ ID NO: 4201 - DNA, 1400 bp, Cricetulus sp.
  misc_feature (481)..(510): n is a, c, g, or t
  misc_feature (1292)..(1346): n is a, c, g, or t
tgctgcagaactcaaatctctgctgggcaaggatgttctgttcttgaaggactgtgtgggcccagaagtagagaatgcctgtgccaacccagcagctggcactgtcatcctgctggagaacctccgctttcatgtagaggargaagggaagggaaaagatgcttctggcaacaagattaaagctgagccagccaaaatcgatgctttcagagcctcactatccaaacttggggatgtctatgtcaatgatgcttttggaactgcacaccgagcccacagctccatggtgggtgtgaatctgccacagaaggctggtggatttttgatgaagaargagctgaactactttgccaaagctttggagagtcctgaacgccccttcctggctatcttgggaggagctaaagttgcagacaagatccagctgatcaataatatgctggacaaagtcaatgagatgatcattggtggtggaatggcnnnnnnnnnnnnnnnnnnnnnnnnnnnnnnggagattggaacttctctgtatgatgaagaaggggccaagattgtcaaagatctcatggccaaagccgagaaaaatggtgtgaagattaccttgcctgttgactttgtcactgctgacaaatttgatgagaatgccaagactggccaagctactgtggcctctggtatacctgctggctggatgggcttggactgtggtactgagagcagcaagaaatatgctgaggctgtggctcgagctaagcagattgtttggaatggacctgttggggtttttgaatgggaagcttttgcaaggggaaccaagtccctcatggatgaggtggtaaaagccacttctaggggttgcatcactatcataggtggtggagacactgccacttgctgtgccaaatggaatacagaggataaagtcagccatgtcagcactgggggtggtgccagtctagagctcctggaaggtaaagtccttcctggggtggatgctctcagcaatgtttagtattttcctgccttttggttcctgtgcacagccagcctctaagtcaacttagtgtgtttccacatctccatttggtgtcagctagtggcggagatgcagcaccaggaacccttaaacagttgcacagcatcttaggctcgtctttactgcatcgggatttgtctacattcttcaagatcccattttaatcccttagtggctaagtgcattctagagtgcatctatttatattctgcctgaaaagaaagtgagctataaaagcttagttctctttgagtannnnnnnnnnnnnnnnnnnnnnnnnnnnnnnnnnnnnnnnnnnnnnnnnnnnnnncagctgtaggtttggagaagttgatgctctattaataaagatgtccactgacaa

SEQ ID NO: 4202 - DNA, 278 bp, Mesocricetus auratus
cttcagcggggccagcagcaacagcgagcaggtcggagcgcagccctggagttcacttgcggttcaaaggagactcagtgactcccgtggagcgctctgctttgggcctgggaggagaaaggcggggtggagggtggagggtgggggtgggaagaagggaggtgaaggagtaggggaggaagtccccaggagcagcctgcgcccaaacatttgtcaaacaagcacacacacccacttgggaaatcaagttggtgcgagggggctggtggccactgcag

SEQ ID NO: 4203 - DNA, 600 bp, Mesocricetus auratus
gggtctccatctcctcaaatgtacagggaggtaaaggcagattcctagttaggtactaaggaatcggaggactcctgggggtgtctccctatgtagggttggaggactagtgtagatgctccttattaggtggtttattgtgagtggccacatatgccttctctagagctcagggctccatgactaagaaagaagcacttgacgattcttctacctggccatgaccatgtggagttgcctccaacctccaacactgggtctctttctaccccaattctctggcgccctccttcctagatatgctctgggcctatccttgacttgggtcccctcatcccctgcagaatgactccctgatgaggcagatgagagagctggaggatcgctttgccagcgaggccagtggctatcaggataacattgcacgcctggaggaggagatccggcacctgaaggatgagatggcccgccacctgcgggagtaccaagacctgctcaatgtgaagatggccttggatgtggagattgccacctaccgcaagctgctggagggcgaggagagccggtgaggatttaggtatcgggtagggtgctgggatc

SEQ ID NO: 4204 - DNA, 600 bp, Cricetulus sp.
  misc_feature (519)..(536): n is a, c, g, or t
tgaggacttgtttcacatgcagaattctctctgcccacagtttgtcaaagcttgagttacagatatctgagatttgtctgcaccctgcatgtacacagccctaggtctgcctctttactccatgtgggcatatcagtggtgtgtgttgtgtggagccattcatcacacagtgagtgtgctatggcttgcttcacactcagctaaaggctccctgacagtccagcagatggttatggcgcaggtgtttggatggaccttgtttgaatggtcaggtgagagggcaatgtacagaagggataggataagacacagactggatatatagctcagtgtagagtagttgcctagtgcttccatccctagcacctcccaaaaagaaaaataaatgtaattgatcttatctgggagggaaatttagcattacatttttatttatttattagagacagggtctcagtagtgtgccctgtcctggaactcatgatgtaaacaaggctggcctcaaactcacagagacannnnnnnnnnnnnnnnnnttggctataaaggtgtgtagccaccatgctcccccttcagcattaacctttgaggaaccaccag

SEQ ID NO: 4205 - DNA, 1400 bp, Cricetinae gen. sp.
  misc_feature (428)..(447): n is a, c, g, or t
  misc_feature (754)..(772): n is a, c, g, or t
gagaagcagctgcagaaggacaagcaggtctaccgggccacgcaccgcctgctgctgctgggtgctggagagtctggcaaaagcaccattgtgaagcagatgmggattctgcatgtwaatggktttaacggagagggcggcgaagaggacccgcaggcygcaaggagcaacagcgatggygagaaggccaccaargtgcaggacatcaaaaacaacctgaaggaggccattgaaaccatcgtggccgccatgagcaacctggtgccccctgtggagctggccaaccctgagaatcagttccgygtggactacattctgagcgtgatgaacgtgcccaacttygacttcccacctgaattctacgagcacgccaaggctctgtgggaggacgarggrgtgcgygcctgctaygarcgctccaatgagtnnnnnnnnnnnnnnnnnnnncagtacttcctggacaagattgacgtgatcaagcaggcygactaygtgccaagcgaccaggacctgcttcgctgccgcgtcctgacctctggratcttygagaccaagttccaggtggacaaagtcaacttccacatgttcgatgtgggcggccagcgcgatgarcgccgcaagtggatycartgcttcaatgaygtgactgccatcatcttcgtggtggccagcagcagctacaacatggtcattcgggaggacaaccagaccaaccgyctgcaggaggcyctgaacctcttcaagagcatctggnnnnnnnnnnnnnnnnnnnccatctctgtgatcctgttcctcaacaagcaggacctgcttgctgaraaagtcctcgctgggaaatcgaagattgaggactactttccagagttcgctcgctacacmactcctgargatgcgactcccgagcccggagaggacccacgcgtgacccgggccaagtacttcattcgagatgagtttctgagaatcagcactgcyagcggagacgggcgccactactgctaccctcacttyacctgtgccgtggacactgagaacatccgccgcgtcttcaacgactgccgtgacatcatccakcgcatgcacctccgccaatacgagctgctctaagaagggaacacccaaatttaattcagccttaagcacaatyaattaagagtgaaacgyrattgaaaagcrgttgatcacccaccatagggcatgatcaacaatgcaacctttccttcttctccccagtgattctgaaaaccccctcttccccttcagcttgctttgatgtttccaaatttagtaagcttaaggcggcctacaaaagaaaaaaaaagaataagaaataggccacaaaagttccctctcactttcagtaagtaaaataaaagcagcaacaaacagaaataaatgaa

SEQ ID NO: 4206 - DNA, 600 bp, Cricetinae gen. sp.
  misc_feature (41)..(61): n is a, c, g, or t
gttgctgcattcttaaactttttatttgcactatgagcctnnnnnnnnnnnnnnnnnnnnntgtgagcaaagtaaatctcttaaattaccactattaaaaatgctgagattgtatctgtaagaaacatttaaagaggagatatattagttttttaattggtattttaatttttatatattcgggaaagaaagctgtgattgaatattgttaattataccaccatgtgtttagaacagtgtgaagcactcagtttcatgtcagtaaccatctaagaagttttgctcagtggaataaacatatgttttatcagtgttgcctatattttcccacttggattctttcagtgagtcattgtcaacagttcctttaaatgcaaataaattctaaaaatttaccacttttttgagttttttaatgtaaaatttcttaaacttaaggactgtctcttatagaactctgcatgccaatcatttccctataaattaacttggtaaccctcaccaaatatcgcaagtaatggttatctggtagaatggtttggcagaactaggaaggctcctgtctacttgagacagtactatttactacatttctctgtt

SEQ ID NO: 4207 - DNA, 600 bp, Cricetulus griseus
  misc_feature (243)..(322): n is a, c, g, or t
tgtgaataaaaaaccaatgtgattctaactytggttttctttgtgtgacttggaaataaggaagtggggtgacagattgacttaatgagattgcaaggatttggttctggasttgttggtccctttacctcttcaccctctgccccagaggagggggaagtgtcttagggaaagatcaattatgtcatgagcttcctcttaatggaagacgagcagctgtgtgccggatcagactctctctcnnnnnnnnnnnnnnnnnnnnnnnnnnnnnnnnnnnnnnnnnnnnnnnnnnnnnnnnnnnnnnnnnnnnnnnnnnnnnnnngccatgcgtgcgtgtgcagagctctagcaagtgctcacatttgcttgtgcatgtggaggctgagatggacattgggaatcttcctctttcactttctgccccccaccttgagacaggtttatctgtgtagctttggaggctgtcttgaaactgactctgtagaccagactggcctcagactcacagagatccgcttgcttctgccctacaaatgctgggattaaaggcttgcaccaccattgactgggcctctaatcttactttttgaaatgagatct

SEQ ID NO: 4208 - DNA, 1400 bp, Cricetulus griseus
  misc_feature (112)..(134): n is a, c, g, or t
  misc_feature (1222)..(1266): n is a, c, g, or t
atgggaggagcaggaagaaaggaggtgggggggggactgggattgaaatgtaaaaaataataaataaataacaaaaccactggttgctcttccagaggacctgggttctatnnnnnnnnnnnnnnnnnnnnnnnccaaatcatgtgactagttccaggttctgatgtcagtggacaactagcataccagcatccaagtggttcacagacataatcaggcaaaacactcatacacacaaaataagaatcttaacaaaaccttctgagatgggagtgttggtgcgtgcctgtagtcctcttccctggactgaagcaaatggatctcttgaactcacaaactcaagcagttttggcaatacaatgagaccccatctcataaaaacagaaaaagcaaacagaatcactctgaagagagatccatagcctctctcatcctgctgtaggagttcgtgatctaagacactcagaatcattgtatgcttagagtggacagattgctgatggcttgtattgcctttctacaaagtgctttgcccaggtgggatttgtttattatttatttttgtttgaaggggtctttgttgatgttactagccatacctagagtagttcctagggtgattctggcaggttggggtgtgtgtgtatgtatgcatgtgtgttcatttacttgttcagaatattaagtgaatcctcatttcagtggtcgcagatcagttctttggtgccttttttcaagctcgtgaggctggctggctctctagtattaatattgctggaagcagctaagtgtgaatgggtgtttctggcaaggagcagattttcattttaattgacactttcttttatgcattaaaccatggatgccaagtgctttcctcactagtagttgtaaatgctaaatctatacatggcgttcaccacctcctgtcaagataaatgccaagcttcatttcccctcagagcagttcaaaggaataatttacccctggtttgcttgggaagatgtttgcagccagcctcacgtggacccagctgcaaaaattcccagtgcctaaagcaagctcagcagtggtgtttgttcttgtgaaacatacagcagctggaatgagaattcagattgcttgcttgttcaaatcctacagaagtggcggtggtaacgtcttaagtggggggtatgctgatgccctcaagttcagccagacactacttaacagtatagnnnnnnnnnnnnnnnnnnnnnnnnnnnnnnnnnnnnnnnnnnnnngagtgggataataaagacggtcatttctgaatgaatgccctaagaaatgaggcaggactcacatgctttctccagtgatgcgggtctctgagcagaggcatattgatctgctagtaaaaacccagggggcaggg

SEQ ID NO: 4209 - DNA, 580 bp, Cricetulus griseus
ggagagtgggcgggscmtccacccagcggtagataaaaggccagggtgtagcacgctgaggcccwgacaagcaaaggacttgcttgctctttcctcctggggcggwggtctgktttggtagtggcaagtgaargaagtagctcctggcaagtcttccttcgttgcttggcaggatggaaggtcgcagccgtgtgggaaaaatcagggtggcccgggaatcccggcgcccaaagacccttttgaaaggcatgcagaaggaggcccttctaagtcgtttcgccaagagcccttccccaagcttccgggccagggagcaactagccagggaaatcgggctgcctgagtcccgagtgcgggtgtggtttcagaaccgccgaagtcgttcggsgatggtgaggcgaggcccagaatcctcagcgagccgaagcgtcctggagtccccgaagcsgcctgaaatgtctgatgccagggcacaaggtagaaggagcagcccrtcgggacgtaggaggcctcgcactcgactcagctcgacacagttggccatcctgctccaggcttttgagaggacggtacccgggca

SEQ ID NO: 4210 - DNA, 600 bp, Mesocricetus auratus
gctttggttctcacactgtactctgaggtccaaatgactgtctgtcgtgtaacctgatgtctcaacccccagggagaagaagagtcaatctttggtgttcaccaacatgggaagcttcaccagaacaggcttttgctttgggctctgctgttggtttgcagatcacccaagagcaagccaacatgcgcttcccagcagtaccttagggttttgccattgtaaatgggtctaatgtgatatgacaagaccagagaaattggatgtaaattgacatttttggaaatgcttgttgtttcacatgatacatttagggtatgcagctccttttgtagtttttatttttactatttaagtttggaaatgatgccaaatttttgtatttctttaatcaatgtgttctccttggtgatatatattgcattatatattgatgtgtgtatcaatatatactgatatgtgttacacttacgcatacaaacacacataagtgaggggtggaaccgtagcctgcactccctagcctctgcagagagaccctaagagcagaatctcggtgttgtgatgtacagaaatggagaagagtattaaaccatatttaag

SEQ ID NO: 4211 - DNA, 600 bp, Cricetulus longicaudatus
ttccaaagaagactacaacaccaaaaggtaaaggccgaggggccaagaaaaggaaagcatcaggctcagaaaatgaaggtgattataaccctgggaggaaaccatctaaaacagccagcaagaaaccgaagaaaacatcttttgatcaggattcagatgtagacatctttccctcagacttcacttctgaaccacctgctctgccacggactggtcgggctaggaaagaagtaaaatattttgcagaatctgatgaagaagaagatgttgattttgcaatgtttaattaagtgcccaaagagcacgaacatttttcaaaaatatcttgtgttgtcctttgtcttttctgtctcagaattttgtacatctggcttattttaatgtgatgatgtaattgatggttttttattattgtggtaggccttttaacattttgttcttacacatacagttttatgctcttttttactcattgaaatgtcatgtgttgtctgattggcttgtagaattgttatagattaccgtgcattagcacagattttaattgtcatgattgcagactacagacctgctttttgaaatgaaatttaaacattaaaa

SEQ ID NO: 4212 - DNA, 600 bp, Cricetinae gen. sp.
tctatggccgtatctacgtggaagcccgctctcggattttgaaacagacacccaacaagaccggcaagcgcttgacccgagcccagctgataacagactcgcctggttccacgacctcggtcacctccattaactcccgggctccagacstgcccagcgagtccgggtctccagtgtatgtgaaccaagtcaaagtaagagtctcagacgccctgctggagaagaagaaactcatggccgctagggagcgcaaagccaccaagaccctagggatcattttaggagcctttattgtgtgctggttgcccttcttcatcatctccytggtgatgcctatctgcaaggatgcctgctggtttcacatggccactcttcgacttcttcaattggctaggctatcttaattccctcatcaaccccatcatctacaccatgtccaatgaggacttcaaacaagcattccataaactgatacgctttaagtgcrcaggttgacttgtcaatggcagtggggtcgcctaggcgactttggggaccaagttgggtcttttcacaggtaggtcaaatcttctttccctgttactgggtggaagcaaggcc

SEQ ID NO: 4213 - DNA, 602 bp, Cricetinae gen. sp.; identical to SEQ ID NO: 571

SEQ ID NO: 4214 - DNA, 600 bp, Mesocricetus auratus
cacagaaagcctatcaaagaccttgtgtgtgtgtgtatgagtgtgtgtatgagtgggttgtgcgtgtgagtgaatataaatatatataaatacatataaataaatatatatatcctctgtataaaatgaggtttcagtacaaaaggaaccatgggtgaccctgtgacatcatccactgtcgtttttccatcccatccccatcacccacatgacagaatcttccccaggcaatttcaaatcacacagtgaataaagcacttacagaatatccattgacattttcaagtaatcccctagccttctctcttagagtcattagaggcattagtgatggcgggaatctctggggtcactctcaagcaatgatcaacatttaatgcatttgtaatcacaacaccaggcaagttgtggtgatggaggccaacctgggttacatagtgaggctgtcttaaacatatggacatttggtttccctttcttagcttcagctaagctcttcaaggtaaagatagggtatacccatagaaattagtcacaagaaatcaaaataccactctatctttgtagaccatactattagttgtatggctaaatgaatag

SEQ ID NO: 4215 - DNA, 481 bp, Mesocricetus auratus; identical to SEQ ID NO: 573

SEQ ID NO: 4216 - DNA, 600 bp, Mesocricetus auratus
ctcaactagcactttctttccccttagtttagttgttggaggatagaatctgtatgtgactgacagctagctggctttcttagtcttgagtaatggctcacacctgttttccttgttcatctcatctgagtgtcaagagggatagaggtggatggagtagggcagggtggggcagcttaaagaattccaggactccctacaggctagggaggacagttagaagtcaagatggaccatgactctctttttaaatggccaggcagattaggagctggcatgaacaacagccaagcacccattgccaggggcagagacagaaagagatctggaatgtcatcgcctctaaatttaggtcatgtcaagctttctgcagaaaggcgtgacatagcaactccaggttgcaagattgtgcagagtagtgcccaaactgggaagaaactctgagttcctattttttttttcgttagtttttttttttaattttaaatagcttgttttacatgtcaatcccagttccctctccctcccctcctcccgcactccccttccaccctccctcccaccctattgccacatacttccacataggggatgtctaga

SEQ ID NO: 4217 - DNA, 600 bp, Cricetulus griseus
tcaaacccattttcaactggaatctgtgctatttcatgtatagattaactagaatctaatttttaaattttcatcttacttccaaaaatatttgtccaaatactctgtgaatgcattagtttcttatgggaaaacatcatatcttttgatcaatgtgtttcttagcttgaggttctctccaaacaggaccaagacgaggccaggaccaatgtgatacaacccatagtcctcaagaaatagttgtcatttcttattccaattgcatcccaaggtctcatctcattttgcgtgtgcctttgacaccccatacccacataaactaaggtggtgttattttttgaggccctgaaggtatcttcaggaatccataagtgagccttaagctgcatctggatataggaatctgaaagtgtcccttctctgcatgatctcttctttcagtttttcaagtcagtgtgccacaggaatcaggaacgataaatggagaggggaagtgcagttgcttggtatagacaccccagaggctatttgcatcctgtccttcaaaatctctctgagccttcctgcctaagccttgttttgagttgggtttgtggtacc

SEQ ID NO: 4218 - DNA, 1400 bp, Cricetulus sp.
  misc_feature (565)..(579): n is a, c, g, or t
gaccaaaattccccaaaaaaatactaagaaagcactgaagccacaaaagagtgccatgtctggtgaccctgaaagtgatgaaaaggacagtgtgccagcttctccaggccctcctgctgctgacttgccagctgacactgaacagttaaagccatcttccaaacagactgtggcagtgaagaagacagccaccaaaagccagtcttcaacatccactgctggtaccaaaaagagagctgtaccaaaaggaagcaaatcrgattcagccttgaatgctcatggccctgaaaagcctgtgcctgccaaagccaagaacagccgcaaaaggaagcagtcctcttctgatgattctgactctgattttgagaaagtagtctccaaagttgctgcaagcaagaaatccaagggagagaatcaggatttccgagtggacttagatgaaactatggttcctcgagcaaaatctggacgagcaaagaagcctatcaaatacctggaggagtcagatgatgatgatcttttctgatggggagagtattgttttagcaatggttttactgagccnnnnnnnnnnnnnnnttatttgaagttcttctctaaccccctctgaatttagtttggggaagactttttataagactatcctacgtggccatcagctttatattctatatactgtctcagtgatgaccatctcatgacactgttttcttctctgatttatctatgttttgtgtctatttctttggtctctaaaatcttgcttgagattcttttggattccacataattatatgctcacttcagcatgacagaatttattgatcatatgttaagctaaaatgggtatgttttcaaaagtgtgcctctacctcctttcctatgtctactaagatatgaatgaggtagcaaggtgtttctttttcagttgtgtaggtagaattccatcacatagaactagacagttctagtatggatacagtgttcaacctatgatttgatgcatttttgtttcagccataaaaaattactcataactcttttaaacatcatcagagkctgaagaaagtcatcttgactgtgtctccatgatctcagtacatgtagcaagaaaaagagagttagtctggttatgtggcatcctgactttccttatgatacctttcgaacatgagatcacagggaggagacagaagtgctcagacttacatctgcatgctcaattgtgaaatgtggtccattgcaagtgtacagagttccaacttgtgaacgccaaaagcattctgtgctrttgtatgttacttaagtgctgttatcaatgtgttttgtaaatatttaatatgtctttctatrtagcttattccaacaattttgtacattaataaatatttaaacattgt

SEQ ID NO: 4219 - DNA, 1400 bp, Cricetulus griseus
  misc_feature (439)..(481): n is a, c, g, or t
ttcaagctacagatcgagaggaaaataaacaaatagccttgggaacctctaaacttaattatctggaccctaggatcacagtggcttggtgtaagaagtggggggtcccaattgagaagatttacaacaaaacccagagggagaagtttgcttgggccattgatatgaccgacgaggactacgagttttgaccagtcttgccaggggttctatgaaaagggacagtgtggtttgaggaagatggataaactgagcctcacttgccctcacacctgagggagaggccacaagtcttaacaaaccaacatctttgcaaaaagatagacctggagatgttataagggagagctgagccagttgtcctatggacaacttatttaaaaatatttcagatatcaaaattctagctgtatgatttgttttgaattttgtttttatnnnnnnnnnnnnnnnnnnnnnnnnnnnnnnnnnnnnnnnnnnnggcaaattcagttttgctgcaatgtttggattctctcagctactgtatgcaaagtctgattatattggtgcgtttttacagttagggttttgcaataacttctatattttaatagaaacgaattcctaaactccctcctctccccatttcaggaatttaaaattaagtagaacaaaagaaaaacccagcgcacctatttagagttgtcactctatcgtcacgggaatcagttttcattaaacttgaagcagttatgacatcggcagtgttttggttcagacacctattcacagaaaagcatgatgagaaaatatttcctgacttgagtgttcctttttaaatgtgaatttttatttctttttaattattttaaaatatttaagccttcttcttgatcttaaagatcgtgtagcttggggttggggagggatgaagggtgagtgagtctaaggataatgaaataatcagtgactgaaaccattttcccatcatcctttgttctaagcattcttgtaacctttaagagatccatctttttctttggaaaccccagtctttcatttgaaagattttattgtatcaaaacttccacaggtcagtaaatttagaggaaaatgagcatttggtccaagaaaaaaaccaaaaccccaaaaaacaaaaaaggaaaaataatcaagattttagggcttttattttttcttttgtaattgtgtaaaaaatgggaaaaaaaagaccataaaaagcagaattttaatgtgaagacattttttgctataatcattagttttagaggcattgttagtttagtgtgtgtgcagagtccattccctcatctttcctcaagtatcttctatttttatcatgaattcccttttaatcaactgtaggttatttaaaataaactcctacaacttaacgg

SEQ ID NO: 4220 - DNA, 218 bp, Mesocricetus auratus
  misc_feature (175)..(177): n is a, c, g, or t
tccctgtaaagggggggtgcagagagaacttctgaagtttttatttattttttatatttatatttatttattattcatttatttatgagaatctgctttggtgccaggtctggctaggtactgggaaataaatgggatataaggtggactaagttcccactatcatttagtcccnnnctctaggaccagcctctcatataagaagttatcacataaat

SEQ ID NO: 4221 - DNA, 600 bp, Mesocricetus sp.
  misc_feature (558)..(572): n is a, c, g, or t
cagaacttctgcattcatggtgaatgcaaatacatcgagaacctggaggcagtgacatgcaattgtcatcttgactactttggtgaacggtgtggagaaaaatctatgaagactcacagcggtgatgacaatgacctatccaagattgcattagcagccataactgtcttcgtctctgctgtaaccttgatagctgttggcatcgttgtcatagtcctgcttcgcaaacggcacctcaaggaatatgaagaagaagcagaagagcgaaagaagcttcgtcaagaaactggaaatgtgcctgtcatagcctagttgaagacaattcaggttaacagtcatgtcactgccaagtagaagcaaaaatacccacattggtcctcttctctatgaaggaagtggagcctcctgatggttccagtctctcggttgtcacttttcatgacggtcttatttctgtacataatgagatgtgtggagataaagtattttttcatgttgtaaataatctatttatatttaagtcgttatttatcttatagcttcattaaactttttttnnnnnnnnnnnnnnnacaggggactaattatctacacattcat

SEQ ID NO: 4222 - DNA, 306 bp, Mesocricetus auratus
  misc_feature (191)..(193): n is a, c, g, or t
  misc_feature (201)..(201): n is a, c, g, or t
  misc_feature (205)..(208): n is a, c, g, or t
  misc_feature (255)..(255): n is a, c, g, or t
  misc_feature (270)..(270): n is a, c, g, or t
  misc_feature (280)..(280): n is a, c, g, or t
taagtyaaactcacagaatgtgtggtacgtgcccggcctttgctggcagggtcacaccgattatagcatttaatctccactgccaccccacacagtaagaactgttatcactgtcatttcgcagataggaaaattgaagctggaaagagttaggtaatatctcaaagtacgttgtcagaagttagaatttnnntacagacncccnnnnctctggtgaccatgatatctgttgtctcccaaatcactaataaggangctgtattatagatngctaccaagntgccttrgttctattmtaawyagaat

SEQ ID NO: 4223 - DNA, 561 bp, Cricetulus griseus
  misc_feature (442)..(472): n is a, c, g, or t
  misc_feature (546)..(560): n is a, c, g, or t
ggggtctaagtctatggtctatcttgctggcctttgtctcccgcattgacaaatctttttactgttacccatggaaaagagagggctcttattgactacatttgatcygtctattttccctggtratcttcccagtcctcmcttcaagatgcttgaagtactcaagagaatcyaatttatgcactttgtacatttgatccgttagctttgaagggcgaagtggttgggggtggtttttgtctgttttatgtttgctcaatcagacatcaaaagtgcttatctttaaaagtgcacttaaatttcaggagaaaattttatctttaattcatttcatatttatagagattaaacattttaatataattaacttgaagttcttttcttctctctctttctctctttctctctttctctctttctcccttccttccctccttccttnnnnnnnnnnnnnnnnnnnnnnnnnnnnnnnttccttccaagacagggtttttcccgtggctttggaggctgtcctggaactagctcttatagaccgggctagtnnnnnnnnnnnnnnnt

SEQ ID NO: 4224 - DNA, 141 bp, Cricetulus griseus
tattttttttgtttttgttccttaactattgagcctcagccagtgtgggtccttggggaaaatatcattccagaagaagttatccctccagggaaattggattttactgggtaaattagtacttttagatcatatcctctc

SEQ ID NO: 4225 - DNA, 574 bp, Cricetulus griseus
gtccttcaggaagagcaggcctccctggaagaaggagaaattccttggctccggtacaatgagaatgaaagcagcagtgaagcggataatgagtccggccatgagatgatgcagcctgggatgttcgtgctggatggaaacaacaacctggaagatgactccagtgtgagcgaagacctagaagtggactggagcctatttgatggctttgcagatgggttgggagtggcagaagccatctcctatgtggatcctcagttcctcacctacatggctctcgaagagcgcctggcccaggcgatggagactgcccttgcgcacctggagtctctcgccgttgatgtcgaggtggctaacccacctgcaagcaaggagagcattgatgcgcttcctgagatcctggtcamtgaagatcatggtgcagtgggccaagaaatgtgctgtcccatctgctgcagtgaatatgtgaagggtgaggtggcaactgagctcccgtgccaccactatttccataagccatgtgtgtccatctggcttcagaagtccggcacctgcccagtgtgccgctgcatgt

SEQ ID NO: 4226 - DNA, 581 bp, Cricetulus griseus
gcctccggaggtgcaggagctgagcagtcggcgacctattgcctcaacatgcttagccaaatgccgggggagattccattctctagggcagcgagtgtctgtgcaaccacyaccttatcttwttttgtttgggttttgagtctacacacagtcccaagcataaacaccacaccactgcagagaattgtgccaaatgtcccacccccacccattccttaaaataggagacagctgaagcgatccatgatgacaatccctccgtcaaggacaggtcaaggtgcatggagttaatctggataatagcggctctcaactcccggggagagggtggagttccgacttttgagggtccgaaggggctcttagggtgagtctttccgggatccacaggggattctcttcatccaccctgcagttctgaatccgccccgtccgaggggtctccgcagtgccggcgatgttaacaagttcccgggtttcggcaccagatgtcccgcgcgatcgtctcgccagcaagaacaacacaggacactcgsmymcktctgcagtaaagctttaatgcatcttgagagagagagcat

SEQ ID NO: 4227 - DNA, 569 bp, Cricetulus griseus
  misc_feature (286)..(311): n is a, c, g, or t
  misc_feature (350)..(366): n is a, c, g, or t
ctcagcgccgactgtccgcttcccgccgggtaggcctctcctgtgccaactgccagaccaccaccactacactgtggcgccgcaatgccgagggcgagcctgtgtgcaatgcstgcggcctytacatgaagctccatggggtacytaggcytcttgcaatgcggaaggaggggattcaaaccaggaaacgaaagcccaagaacctgaataaatytaagacatcagcaggtcctcctggtgagagcctccctcccagcagcagtgcctccagcaactccagcaatgnnnnnnnnnnnnnnnnnnnnnnnnnngaaragatgcgtcccatcaagacagagcctgggttgtcnnnnnnnnnnnnnnnnngcacctccatatcccaggcattytctgtcagttctgtgtccggccatgggccctccattcatccagtgctgtcggctytgaagctctccccmccaggatatgcatctcctgtcactcagacatcacaggccagctccaagcaggactcttggaacagcctagtcctggctgacagtcatggggacataattamtgsgtaacta

SEQ ID NO: 4228 - DNA, 514 bp, Cricetulus griseus
aggtgtggtcattgctgacagcgaatatccttccagagtggcctttaccttgctggagaaggtactagatgaattctccaaacaggtggataggatagactggccagtaggatcwcytgctacaatygagtacacagccctggatggtcaccttagtagataccagaacccccgagaagctgatccaatgagcaaagtacaagccgaastggacgagaccaaaatcattctgcataacmccatggaatctttgttagagcgaggcgagaagcttgatgacttggtatccaaatcagaagtactgggaacacagtcgaaagcgttctataaaamtgcccggaaacaaaactcatgytgtgcaatcatgtgatgtagcccccagaggcaggcgctggatcgtcatgtcacatcagaactatagcccctggaggtgaagcgataccctagaagaagatctggagccaggcagactggctgtttttattttgaagttctcaagaggaatggaggtagt

SEQ ID NO: 4229 - DNA, 574 bp, Cricetulus griseus
ttttttattaagtttatttattatgtaaacgtgttcctgtatgcatgtatgcctgcaggccagaggaaggcaccagatcccattatagatggttgtgagcccccatgtggttgataggaattgaattcaggacctttggaagagcagccagtgctcttcacctgtgagtcatctctccagcccctcctttgaatttttaaagaaaaatatattgatataatctcttaatactggtccatagctgtgtttctaaaatgaacgccaatgatttataatgacatttaatttgattttttgatatcagttcatgatatgtttgcccaataatatatgttgttagaatatgcttctttagctacagaatgtacagacatttcattgttgccttctcttttgagaaggggacatgttgaatttgtttgaaccattgcattcttgaaatatgctttgatgttggccagtttttactaaatttaagtttattttgtgattaatgaaataatcaggcatatgtcctcaaatagctatgggtacagcccagcataaaatcataaccctaaaacatcctaagaca

SEQ ID NO: 4230 - DNA, 579 bp, Cricetulus griseus
tattgagggtgctgatgtaaatccccactgcttatcttagaagtttcaccccttcttccttcattaaggccacgagatttgtgtcaggctcatctttggcaaggctcacactaatctccacttcatccacactgttttcatcagacaaattggggatttccacatgtcctttgtattgcactcctgacttagaggtacctgtccagtttaatttgatggtccactcataaaagaagatcagtttgcctttccggttgttaatggacgcctctccatcaagcttgttcacttccgtcacctcacatttgccctcctcattttctactcgaactgccaggaatagagttttcagcttttctgtggaccaatttgaggcatccctttctgtccagtgccagttgttgacgttggtggcgtccgcccgctcctccacgatccagcgtgggtctccctcaccccacttggccatcagctcacacttcgcgccgctaccagctcccaagcagccgcagccacagcctcaggaccgctcggtcccagccgcccggcagcgcctggaaactactagaagcggcagta

SEQ ID NO: 4231 - DNA, 249 bp, Cricetulus griseus
  misc_feature (43)..(97): n is a, c, g, or t
gtggacccggaacctctcagggtcgcaaacggaggcagacgannnnnnnnnnnnnnnnnnnnnnnnnnnnnnnnnnnnnnnnnnnnnnnnnnnnnnncctaatgtgcccacaggaggcctcaccctcttctgcagtgggccaggaggccccctccccaccttctgccttagcccttccttcactctgtgtgtcttaattattatttgtgttttaatttaagcgtatcctgtatatactctgcctgccct

SEQ ID NO: 4232 - DNA, 1400 bp, Mesocricetus auratus
  misc_feature (438)..(458): n is a, c, g, or t
  misc_feature (649)..(668): n is a, c, g, or t
aactacagaacaatgtgctaagcagtgctaaattgttctcatgaagaaaacagtcactgcatttatctctgtaggccttttttcagagaggccttgtctagatttttgccagctaggctactgcatgtcttagtgtcaggccttaggaaagtgccacgctctgcactaaagatatcagagctcttggtgttacttagacaagagtatgagcaagtcggacctctcagagtgtgggaacacagttttgaaagaaaaaccatttctctaagccaattttctttaaagacattttaacttatttagctgagttctagatttttcgggtaaactatcaaatctgtatatgttgtaataaagtgtcttatgctaggagtttattcaaagtgtttaagtaataaaaggactcaaatttacactgataaaatactctagcttggnnnnnnnnnnnnnnnnnnnnntagcgttgtccaggaaaccctgcttgcttgccaagcctaatgaagggaaagtcagctttcagagccaatgatggaggccacatgaatggccctggagctgtgtgccttgttctgtggccaggagcttggtgactgaatcatttacgggctcctttgatggacccataaaagctcttagcttcctcaggggnnnnnnnnnnnnnnnnnnnnttaattttttttttaatgtaccagttttgtataaataataataaagagctccttattttgtattctatctaatgcttcgagttcagtcttgggaagctgacatctcatgtagaagatggactctgaaagacattccaagagtgcagcggcatcatgggagcctcttagtgattgtgtgtcagtattattgtggaagattgactttgcttttgtatgtgaagtttcagattgctcctcttgtgactttttagccagtaacattttatttacctgagcttgtcatggaagtggcagtgaaaagtattgagtattcatgctggtgactgtaaccaatgtcatcttgctaaaaactcatgttttgtacaattactaaattgtatacattttgttatagaatactttttccagttgagtaaattatgaaaggaagttaacattaacaggtgtaagcggtggcttttttaaaatgaaggattaaccctaagcccgagacccagaagctagcaaagtctggcagagtggtaaactgtcctgctggggccatccaatcatctctctccattacactttctaactttgcagcattggtgctggccagtgtattgtttcattgatcttccttacgcttagagggtttgattggttcagatctataatctcagccacattgtcttggtatcagctggagagagttaagaggaagggaaaataaagttcagatagccaaaacac

SEQ ID NO: 4233 - DNA, 600 bp, Mesocricetus auratus
  misc_feature (51)..(94): n is a, c, g, or t
  misc_feature (372)..(401): n is a, c, g, or t
ggggcaacccttgtcccaagacaagtatgtgaccagcgccccaatgcgggnnnnnnnnnnnnnnnnnnnnnnnnnnnnnnnnnnnnnnnnnnnngtgacagaggaggaatggaactccggggagacctacacctgtgtggtaggccacgaggccctgccacacatggtgaccgagaggaccgtggacaggtccaccggtaaacccacactgtacaatgtatcgctgatcatgtctgatgcaggtggcacctgctactgaccatgctagcccccaaccaggcaggctctggggggccagttgcactgtttacacaaactaaccatgtcagagtgagatgttgcatcttataaaaactagaaataaaaaaaaannnnnnnnnnnnnnnnnnnnnnnnnnnnnntgcaatgcttttggctgccgaggcaacggctgtgttgtgtttgccttgcacgcaccctgcagatttgcctctgccctgacccttcctctgtctgcacagttgcctccttctgtgtgaactcacagagtgtaaggatgccatccctccagctgcttccagatacagggctggaagcgtggctaccctggtgcaggcagaa

SEQ ID NO: 4234 - DNA, 531 bp, Mesocricetus auratus
ccgggatgctcctcgtggttgtgctgacctgcctcagcgtcatgatcataatgtctgtgtggaggcagaggagactgttgaggaagatgcctccaggacccaccccactgccctttattgggaactttctggagctggacacagagaagttttatgactgcctttcaaaggtagtaccgggcagggagatgggtgagtttgacaagtggtgtctgggagtccgaggcgggagtgtgaggcagaagccggaccaggtcagaatgtggacataggatgggggcctaggggtctgcatccaagtccctgacattgggacaatggccgtcctaagagtggcttctctaactcctggcgtctcccctcagatgagggagcggtatggccctgtgttcaccatccacctggggcctcgccctgctgtgatgctgtggggttacgatgctgtgaaggaggctctcattgaccaggctgaggagctcagtgaccgaggagagcaagctttcttcgactggttcttcaaaggctatggtg

SEQ ID NO: 4235 - DNA, 402 bp, Cricetulus griseus
  misc_feature (45)..(85): n is a, c, g, or t
  misc_feature (113)..(169): n is a, c, g, or t
  misc_feature (174)..(196): n is a, c, g, or t
aagatccaggacaaggagggcatcccccctgaccagcagaggttnnnnnnnnnnnnnnnnnnnnnnnnnnnnnnnnnnnnnnnnntccgactacaacatccagaaggagtctnnnnnnnnnnnnnnnnnnnnnnnnnnnnnnnnnnnnnnnnnnnnnnnnnnnnnnnnngacannnnnnnnnnnnnnnnnnnnnnntgagcccagtaacaccatcaagaaaagcaaacaggaagatggacgcacctttctcactacactgtctagaaagagcacaccttgtgcttgttcttgggcttgaggggaggtgttttaatttaccccatcttttaagttgttaacaagtttcattgcactttgaataaagttcttgcattcccaaaggtgttggatctcgttttagc

SEQ ID NO: 4236 - DNA, 1380 bp, Cricetulus griseus
ctgtggcatgaagaccctcgagtggctgtccctgaagacatataagtggcagggcctctggaacattccaacctacaagggcaagatgaagaggattgcttttcagttcacgccctacagctgggtacgctttgagtggaagccagcctccagcctgcaccgctggctggccgtgtgtggcatcatcttggtgttcctgctggccgagctgaacacattctacctgaagtttgtgctgtggatgccccctgaacactacctggtcctcctgcgcctggtcttcttcgtgaacgtgggtggtgtggccatgcgtgagatctatgacttcatggatgaactgaagccccacaggaagctgggccagcaggcctggctggtggcggccatcacagtcacagagctgctcatcgtggtgaagtatgacccgcacacactcaccttgtcactgcccttctacatctcccagtgctggactcttggctccatcctggtgcttacgtggactgtctggcgcttcttcctgcgggacatcaccatgaggtacaaggagacccggcgacagaagcagcagagtcaccagggcagagccatcaacaatggggatgggcacccagggccggatgatgacctgctagggactgggactgcagaggaagaggggagcaccaatgacagtgtacctgctgaaaaggagggggcctcagccgcctcatgatcctctccctctttactggccttatgcctgccatagggctgtcccatttctcccgtccttatgctccctgcttcagaggaggtggggggcccattcccaactccaccaggggcacctgagtgtacatgtttgtgtgcaggtaggtgtgtgcacatattggctcctgacacgtctccagggctgtgagctcctcagtgagcctggagcttgctctagagcaagggtcctgccctgtccttctacctggtcagccaaggcactggcccatggtctctcctgtgttcagtctcagcacaggccaggagaggcatgtcagtactctttctctaccctctgtggggcaaacagaagccccatgcaccctgtggcctcacccaacttgcagcagcagaagtgaaggatgttacaacaccaagatggtctcaaagtggtgggtctggagtcagtactgagctgtggcctttggagccttctttaaccaggactctaagctgagggtgtgtaatggagggggtcaccagatgggcctcttgagggatatcaagtcagagagtccaacttggagacctgtataccacaggtgctagggttgtgttgtcaccatggctcccagagtttatagtcatattcttgagcaaacagaacaaataaagtgatgatgaagg

SEQ ID NO: 4237 - DNA, 600 bp, Mesocricetus auratus
  misc_feature (370)..(447): n is a, c, g, or t
atccaaggacattgcccctaccttaaaactctacgtgggaaaaatgcagccggtggagattgagaaggtggttatccaccccaaccgctctgtggtggacattggggtcatcaagctcagacagaaggtgcctgtcaacgagagagtgatgcccatctgcctgccttccaaagactacatagcaccaggccgcatgggctatgtgtctggctgggggcggaatgccaacttcaggtttactgatcgtctcaagtacgtcatgctgcccgtggctgaccaggacagctgtatgcttcactatgagggtagcacagtgcccgagaaagaaggctccaagagttctgttggggtacagcccatcttgaatgannnnnnnnnnnnnnnnnnnnnnnnnnnnnnnnnnnnnnnnnnnnnnnnnnnnnnnnnnnnnnnnnnnnnnnnnnnnnncgacctggagcaggacacctggtatgcagctgggatcctgagctttgataagagctgttctgtagctgagtatggcgtgtacgtgaaggtgaactccttcctggactggattcaggaaaccatggccaagaactagtgcatactgactggagg

SEQ ID NO: 4238 - DNA, 600 bp, Mesocricetus auratus
tgaaggaaagggaagcatggagcaagagagcgaaaggatgtgggaaagtggtgtcccatgacctggcatttgagctcaaactaattcctgttcaggttggatatgaatagcaacttctgtctaacctcagtccttcttgggctgagaggccaaatttagaggcattgctgtcacctaaggtatcttgtatgccttcccttgatcatgataatgttgtagtctttgaccacttaaggaaatccctcagcagaaaatgaagaataaagtgaatgtatttgttttccccaattttaatagcaatgatgaatcctttcatcaggcaagagttggaatgtgtaagtacagttgagctccgagaaccatataaggacgctagcaggcaaattacacctgtttgtcattgttgtggctcactgaaaatctctagtttggggacagaagtgttttctaccattgcctgtgtcagatggaattgagaggaaaccagctgtatttccttgttttattattcctctaaagagatatatatgttttgataaaaatctcttgtttctggtgctcagagtattgtatagatcaaacattgacttgttggaattc

SEQ ID NO: 4239 - DNA, 1400 bp, Mesocricetus auratus
  misc_feature (325)..(347): n is a, c, g, or t
cactgtgggtcaaacccagaacttcacagatgctaggcaagcactctccatcctcagaccccatccttcctcaccacaggtctataacagtcctcctaggagcccacaacaaaaaggtaaaagaagacacgtggcagaagcttgaggttgaaaagcaattccctcatccaaaatatgatgaccgtttggttctcaatgacatcatgctactgaaggtaacaagtttctccctccattccgctcccttgcatttttccttcaggtccccattgctctgagctttccccgccctgcttcaggaaggcactcccttcttatccccccnnnnnnnnnnnnnnnnnnnnnnnctcacacacatgcacgcacgcacgcgcacgcacacacatgcacacacacgctcacacacgcgttcacacatgcaccattggacttggtatcttgccctttccctccctgatcgtctggagctgcctcctactccacggccctcactaagagccccttgttcccttcacagttgaaggagaaagccaacctaaccctaggcgtgggaaccctcccaatctcagccaaatcaaactccatcccacctgggagggtgtgccgggcagttggctggggccgaacaaatgtgaatgaaccaccctcggacactctgcaagaggtgaagatgagaatcttggatccccaagcctgcaaacacttcgaggattttcaccaggaaccccagctgtgtgtgggcaatcccaagaagattcgaaatgtatacaaggtgatgctcttactagtttttttttttcaaaaaccgctgctgggggcattgagtgtagaaggaggcggggcagaagattgtcagttaatcacagtttagggatcacaggcgctaggaaacaaagtatccatcttccattagctgtgcagagaatgtgggttatgtgaggtagctaccccaggaaagaaagatgcagtatcaggctcctcctctgactctagacctaattgcaactccaaggagaaatgggcgggagaggtagaggcattcatgcatttcctctctgtgcctccctaacagggagactctggaggacctctcctgtgtgctgggatagcccaaggcatcgcatcctatgtacttcggaatgcaaagcccccttctgtcttcaccagaatctcccattaccggccctggatcaataagatcttgagggagaattaactctggagcttggagcctgtgattaaatctgaagctggaattgagcaggtcttttgaccatgtgcttgggcctgtcttagttcctgcggaagccctgccagctccctgatctctctgaaggttcttacttgtctcagaaggttcctaaaggtcaataaacctcaataaagacccagattctaga

SEQ ID NO: 4240 - DNA, 1400 bp, Cricetulus griseus
aacagaacattgagtgaagctggaaagtcaacttccattcagagttttaaggacaagacgatcagctccagtctggcagttgtggatttaattgatgccatccagccaggctgcattaactatgaccttgttaagagcgggaatcttacagaagatgacaagcacaataatgccaagtatgcagtgtcaatggctagaagaattggagccagagtatatgctctccccgaagaccttgtggaagtaaaacccaagatggtcatgaccgtgtttgcatgtttgatgggcagggggatgaagagagtgtaaaataaccaatctgaatagaaccatccttactcacaggtgcatgattggcaagtcagctattcccaggtgaagtgctcatggcttaaagaattctcagtcatttaaaggacttttagttttgattaacaagactagctcatcatgacagccttcggggaaagacttttagaaacaagcaactcctttcccttccagttggatctgttcagcacacctgaacatgctcacagccggccatctgctctctcctcctagaatactgcccttgacatttcctgatgcttgtgtattacctctctgtgtatcttttcctcttaggctgtccatctcttgagacttgcttagatcggtagatagccatagtattaacttgccattttgctttccaagttcttactggagaactgtggtcagatactatgtggagatgtgagtgtccttgcttactttgtagtgctgaaaatctgctcatgttactggctgtgcagaatatactagaagcttttctcattcttttattcttaaaagcagtatctttttacagtattctttctacatgattatttttttgtacatttaagaatattttgattacggtcaacaagtctgctgatttgttacttttttaaaggggacttcaagtaagtaaaagaaaaagcataaactatagggggaggaaaatggaccctaagtttgttgtatttccccctcacacccaggatcaaatcaaatgaaatactttgtcttcaatgaatcagttcgacacatgcttctttgttttgaacactttatcacaaaactctcatttgatctaaaatgctgttgaatatgacacctttgaggagagagtgggctcagaatttagatgggactcaataagcaaagtatgctaagtgtacaatagatttttaaatttaacgcatctaacaaggagatgtggtcacgaaaaggggaaagtatgtatgtcggacttgatgttctcttcctttgtcaagctttttgctgtagttctcaagatcatatgttaatctaactctgaaaagtgatgtaatctggtagcaacatagtactccaaataaaggcatttgcat

SEQ ID NO: 4241 - DNA, 462 bp, Cricetinae gen. sp.; identical to SEQ ID NO: 599

SEQ ID NO: 4242 - DNA, 600 bp, Cricetulus griseus
tggtcatggaggctacgggctcacaattcactggggttgtgcaatggaggcagccaacctctttgggaaaattctagaagaaaagaagttgtccaggatgcctgcatcccacctctaaggactctagtgaccatcacttgccccttgaggacatcccagtaccctacagccaattaagtgatagtctccttgctgattcttcactccccgctccctggcttccttgggcaaaggtgtgaggtgaggaaatcctggcactctgctcatccgtcacggcctgtccttcccacacatccatctggcaaagcatctgtaggatggatcctggctggtcctaagcccatctatatgagacaggcagcatctaggaccatgtagcaatcctgttctcacaacaggatgactgtactaaagctggttgtactgggtggcagggtctgggctcagttccctaagaggtggtccagaaacttttgcttagaactctgaagagtgattcacgacacacttgctgtctaccagtagtgacgggaggaggggggactcctgccctcagcactccattggtcaatactattaaaacactcttgggatatccct

SEQ ID NO: 4243 - DNA, 600 bp, Cricetulus griseus
ccaggtcggcaggtgaagctgtgggtgaagatggtaaccccactgatcaagaacttcttctgaggacaggaatggccttgatgaagatgacaggcatggctggtgtgagatccttcagccgtgcttctgcaatgactccggtctgggtgtcccagcgagctcctgtggggacaatgtaactgacggtctgggtgacctacgggaggctgaggcgatgttgggcgtgctgaccatgaataagggagccaccagcagggaggaaggcctggcctccaacctccccaggcttttcagagatgggccagtgaagggggagccccgaagtgttcaggccaggtgccaggggccgaaaatgccaaacatggggtatgaaccaaggactcagaggtgaccgcatgtcgtaatggctctgaggccgcgtctcttcagaggcccatctcagccttctgaatgtcagcggcagaaaactgacggaggctgaagattccagcattgccccttcccgatcgttcccgtgtaatgaatatctaccctgtgtacatagggaataagttatatatataatgtatgtatatgcctatataaacactatctgccctt

SEQ ID NO: 4244 - DNA, 234 bp, Cricetulus griseus; identical to SEQ ID NO: 602

SEQ ID NO: 4245 - DNA, 600 bp, Cricetulus griseus
cagccagtgcctagccatgtcacgctactaccggcggccagtactgctcatcgagttcgatgctggtaagcccttctccttggcgccacgcggttccttcttccaggagatgagtagcagcgacgtgagctccaagctcacgctcctcaccctgcacttcccgcgcctgcggctgctctggtgcccctcgcctcatgccacagccgagctgttcgaggagctgaagcagaacaagccacaacctgatgcagccacggccatggccatcactgcagactcggaaacgctgccagagtcggacaagtataaccccggcccccaagacttcgtgctaaagatgcctgggatcaatgccaagaactgtcactccctgatgaatcacgtgaagaacatagcagagctggcctccctgtcccaggagcggctcacgagcatcctggggcatgcgggaaatgccaagcagctgtacgacttcctccacactgcctatgcagacgtggtgtccggaggcagagtgagaaaatgaccgaactcagatcgctgttcattagtatttgcagagcagttcattctttcccagggcttttagggatgggcatt

SEQ ID NO: 4246 - DNA, 650 bp, Mesocricetus auratus; identical to SEQ ID NO: 604

SEQ ID NO: 4247 - DNA, 600 bp, Mesocricetus auratus
atattattcattgaattttttttggcttttcaagataggatttctctgtattgtttttgaggctgtcctggaactctttctgtaaaccaggctgggctcaaactcagagatctgcctgactctacctacactttgttattgtgaatatcttgctattcccattgcatattaaactttatcatgggtatacctatgtagaaaagagcacagcgtgaacagagttcagtattatttatgcttctaggcatgctctccagaagataagttaggctactctgcatggattgaggacacacttctcagaggaaatgagttggagaaaatgtcagaaaaatcaaaacccattcatagtggaagataataacttcacagggtcttatagtcaaatgaaattgcttgatttaaacattatggaatctcagggaatctattagtgagagttcagtgctaaagctaaatgagacacttctatcaccctaaggatcagggctcactaaggaataaggggaggaaagactctaagaactgggaaacagggagaagagctgtgaactactgactcctaggcatggcacaaccaaggcagtcattaccttactg

SEQ ID NO: 4248 - DNA, 361 bp, Mesocricetus auratus; identical to SEQ ID NO: 606

SEQ ID NO: 4249 - DNA, 360 bp, Mesocricetus auratus; identical to SEQ ID NO: 607

SEQ ID NO: 4250 - DNA, 1400 bp, Cricetulus griseus
  misc_feature (189)..(217): n is a, c, g, or t
  misc_feature (283)..(308): n is a, c, g, or t
  misc_feature (865)..(941): n is a, c, g, or t
  misc_feature (1010)..(1032): n is a, c, g, or t
agcccttacagttatggatacaatggtctgggctttaaccgcctccgtgtcgatgaccttccacccagcagatttgtccagcaagctgaagaaagcagcagaggtgcatttcagtccattgagagcattgtgcatgcattcgcgtctgtcagcatgatgatggacgccaccttttcagctgtctataannnnnnnnnnnnnnnnnnnnnnnnnnnnnatcacttttcccgcttaaaaatacactttacaaaggttttttccgccttcgcattagttaggactnnnnnnnnnnnnnnnnnnnnnnnnnngtggatgatgggcttaagaagaggctctgagagcgaggacctatgggaggaaagtgaaagaactgtggcctgccttggtgccgaggaccaagcagctaactctgcaaaatcctggccaatattcctgttctttgctgttatccttggtggtccttatctcatctggaaacttctgtctacacacagtgatgaagtaacagacaacatcaactgggcaaatggtgaggacgaccatgtagttgctagagcagagtatgattttaatgccgtgtctgatgaagaaatttctttccgtgctggggatatgctaaatctagctctcaaagaacaacagcccaaagtgcgtggttggcttctggctagtcttgatggtcaaacaacaggactgatacctgcaaattatgtcaaaattctgggtaaaagaagaggcagaaaaacaatagaatcgagtaaaatacccaagcagcaacaatcttttaccaacccaacgttaattaaaggagtcactactgccaactctttggatgaacaggaagctgcctttgaatctgtttttnnnnnnnnnnnnnnnnnnnnnnnnnnnnnnnnnnnnnnnnnnnnnnnnnnnnnnnnnnnnnnnnnnnnnnnnnnnnnatgtttgcttgcaggtgaataatactttagagtacttttaaaaattatttcttacagaaaaattaattnnnnnnnnnnnnnnnnnnnnnnntcatggccgtccaaggcattttgctgctaaaattatttagtcacactagtatgctggtctagtaatctggctacacttgaccatttattggaccatgaggacatttgtttcacctagctttagattatggagattgttgtcagtttcatcttatctaaatccctaagcttattggaacagtaaatttgatgaacactagaatacacaagttgcctcagaagggatcattaatgctttttaaagttctgagttaattgatttgaagtcttcaaaaattgagtgataacatctacttacaagaacaggcaaaaaggctgaatttttataatcctttaagtaaactaaataataaagattttttgatctgt

SEQ ID NO: 4251 - DNA, 600 bp, Mesocricetus auratus
gtcaaatggctgattctcgagaagcagaagccggacggtgtctttcaggaggatggacccgtgattcaccaagaaatgattggtggattccggaacgccaaagaggccgacgtgtccctcacagccttcgtcctcatcgcactgcaggaagccagggaaatctgtgaggggcagatcaacagccttcccgggagcattaacaaggcaggggagtacatcgaagccagttacctgaacctgcagagaccatacacggtggccattgctgcgtatgccctggccctgatgggaaaactggaggagccttacctcagcaagtttctgaaaacagccacagagcggaaccgctgggaggagcctggccagaagctctacaatgtggaggccacgtcctatgccctcctggccctgctgctgctgaaagacttcgactctgtgcctcctgtggtccgctggctcaatgagcagagatactacggaggcggctacggctccacacaggccaccttcatggtattccaagccttggcccaatatcaaacagacgtccccgaccacaaggacttgaacatggacgtgtccttccacctccccagccgc

SEQ ID NO: 4252 - DNA, 600 bp, Mesocricetus auratus
tggggtagcagctcctcagccagacggggcactgcctacagctcttccgtgggcatggggggagccaatggaggctccctgggcgaaggcagaacctttggtacaggagatgggggtccctatggcactgacatcggcccaggaggaggttatggggcagcagccggtggcatatatggcaccgatggcgactcattccgggctggcttcactggagacctggattacaacaagctggcagtgagggtgtctgagagcatgcagcgtcaaggcctactacaagggatggcctacaccgtccagggcccaccaggtgtgcctgggccccagggccctcctggcatcagcaaggttttctctgcctacagcaacgtgacacaggacctcatggacttcttccggacacatggagctattccaggcccacctgggcaaaagggagaggcgggcaccccaggacccaaaggtgacaggggccttgctggacaacgaggtcctcctgggccacctggccctcgagggcagaaaggagacaaaggagacaagggcgaccaagtctacactgggagaaggaggaggagtattgccatcaagccataa

SEQ ID NO: 4253 - DNA, 516 bp, Mesocricetus auratus; identical to SEQ ID NO: 611

SEQ ID NO: 4254 - DNA, 440 bp, Mesocricetus auratus; identical to SEQ ID NO: 612

SEQ ID NO: 4255 - DNA, 265 bp, Mesocricetus auratus; identical to SEQ ID NO: 613

SEQ ID NO: 4256 - DNA, 477 bp, Mesocricetus auratus; identical to SEQ ID NO: 614

SEQ ID NO: 4257 - DNA, 600 bp, Cricetulus griseus
ggtgggagagcggacggagggtggggccctggacctccagaagctgagaataggccagtccaacttcttcctcacagtgcccgtttccaggtccctggggcccctgggtggaggtggccagacatgggaaggcagtggagtgctgccctgcgtggggacacctgcagaacaggccctagaaaaggccttggccattctcaccctgcgccgtgccctgccaggggttgtccttcgactacagaaagccctgcaggactattacactctggtggaccgagtgccgggcctgctacaccacctggctagtatggactactcagccgtggtctctgaggaggacctcgtgacaaagctcaatgctggcttgcaggctgtatccgaggatcctaggctcctggtgagagccactggacccaaagaaagctcatctaggcctgagactgggcctaatgaccccccagaagccactcctgaggtacccaaggaagaagctgcccggagggccctagtagactctgtgtttcaggtatccgtgctgccaggaaatgtgggctacctgcgctttgacagatttgcagacgcctctgtgctgagggcact

SEQ ID NO: 4258 - DNA, 600 bp, Mesocricetus auratus
  misc_feature (59)..(59): n is a, c, g, or t
gtgaaggtatcatgtaatctgtaccacccaatcctttgcactctacagggtacactacncaacggaagtggatggaagtggagcagttccaatgtgctgaccttctataactgggagaggaacccctctattgctgctgaccgtggttattgtgcagttttgtctcagaaatcaggtaagacagagaagaaccacctgtgattaacccatcttcccacatccagtatgacaacctgggcatgacacaggtttgagacatacagtgtggacgtgtggtttgtcatcttctctcatggttgcctatatgtctccttgcaacagtgattatcatgcagaagagatgtcttaagtcaagagcagacactgagtcattctttgtttgagttcacagattcacctgccgcattccctttacctcctatctctctgtaggttttcagaagtggagagattttaattgtgaaaatgagcttccctatatctgcaaattcaaggtctagggcagttctaatttcaacagcttgaaaatattatgaagctcacacggacaaggaagcaagtatgaggattcactcaggaagagcaagctctgcctacaca

SEQ ID NO: 4259 - DNA, 1360 bp, Cricetulus longicaudatus
  misc_feature (794)..(794): n is a, c, g, or t
  misc_feature (844)..(844): n is a, c, g, or t
  misc_feature (851)..(851): n is a, c, g, or t
  misc_feature (1088)..(1088): n is a, c, g, or t
  misc_feature (1258)..(1258): n is a, c, g, or t
tgtacagcagcagtatttgtcaagtattcaacacctccttggagatggcctaacagagttagtcactgtcattaaacaagctgtacagaggattttaggaagtgtttctcttaaacattctttgtcccttttggacttggagcaaaaactaaaagaaattagaattcttgtggagcagcataggtctccttcttggattgataaagatgtatccaagtcttctctgtgccaatacatgatgccagatgaagaaacgccattagcagctcaggcctatgggctttctccaagagatattaccactattaaacttctcaatgagacaagagacatgttggaaagtccagattttagtacagttttgaatacctgtttaaacagaggcttcagtcggctactagacaacatggcagaattctttcggcccactgaacaggatctgcaacatggtaactccataaatagtctgtccagtgtcagcctgcctttagctaagataattcccatagtaaacggacagatccattcagtttgcagtgacacacctagtcattttgtgcaggatcttttgatgatggagcaagtaaaagactttgctgctaacgtgtacgaagcttttagtaccccccaacaactggagaaatgactttcttccttcaagaagagctaggatccatctacattaaaatcatctatacctagagtgacaattgcaaccaaaatgcctaataaaatatattcttaagcaaagtcttatttcataatgaagtagattcatttggcaccttattggnatttttaattcatcagcagtctacttcatcaggtgtatctaactggtgcncaaattncaacatcgggatcattcatgatctgtttcagcctggatagctgatccaaaccaagtagataattttatccatacatgtaatggaatgtgatgtcctttcacacatatctgtcttgaaaagtagatctaggatgtgtggactctgaagatatgtttaatcatgaagtttgctggactctgaagtgagagcaagccggattctctccagtcacgtgatttgtctcacacaccttgacanagggcttatcctctagaaatcagtgcattttgaaacctctgatcagctatttttttcctttgctatttttcttcaatatttatttgcagcattttctaaagctttcttagcaaccctcagaagttgcatatagaattatagtctaatgttatgttcatgttgtttactcncaattattaattacagagtttcatttgtgtataaataattttaataactttgtattgattttgagtacaacaaataacttgttgcaataaactattttcata

SEQ ID NO: 4260 - DNA, 1360 bp, Cricetulus longicaudatus
  misc_feature (337)..(354): n is a, c, g, or t
  misc_feature (397)..(418): n is a, c, g, or t
ttcttgccacctctggctatgtgttttgttaccgctgtgtgtttaattatgtgaggagtcatcaagcctgtcccatcacaggctatccgacagaagtccagcatctgattaaactctactctccagagaactgaaagaaattagcctattatcacacagctcaagttctgtactgtaaggccacaagactgctgtggtatggcaaacattgatacttccctaattcacaactacagtaattttcagtaactatggattcctttaaaagtatatagccactcggagcgttggtggcacccgtctttaatcccagcaccctggaagcagaagcaggctnnnnnnnnnnnnnnnnnnaccagtctggtctacagagcgagtgccaggataggctccaaannnnnnnnnnnnnnnnnnnnnngggggagggggagaaggatatagccacttgatcctaatgttttgatttgctctctagcaagctggttaagcaggagaattgggattgcaggtggtgtgagggccagtgtggaggtggattaaagaagaccactaagtgttgcttgtcctcaagagtggggttttcagctgaatgtggtcgtgtcatatctgcactcaggaagcaggattttgagttcaaggacagcttaggccaccatagggagcctgtcaaaaaagtaaaaagataaaagtaaaaagaaagtgagagactatgattaagagggataaaaagctcacaggaaaacccaggtcagaccttatacaacaggtggtttgagaaataggccttctctttaaaaaatatttctttacctgtgaagtgtagaggctttgtcagatggcatacactatgaaatgacttcctctttctagaaatatttagggacattttagagaaacaaccccttccatataccagacttactaacatttgattatcaaattaacaaatgctaattgtcagcatttggagattccttcatgagccatacctgtctctcttgggaaacaggttaaagaaaaatagggtttgttaatggggatgagtctggaaatttcaatgtgaatgaaagctagcaagcaatgatgagatgtacgaaaatacttatctaatgtttaccaaatgcttatctaatgaacatttaatgaggagcaaaagctttctacttgctcttatgagttttctcaattgacagtttgctcaattgacatgaatcacccagggtattatgaaagtttctatgaaacatttaagtaaattttaacaatacatgattctgggaaagaactgttcatgctggcacgattatgtggaaactcaaaagattactccaggggtttaaaataaattttcagatcacct

SEQ ID NO: 4261 - DNA, 882 bp, Mesocricetus auratus; identical to SEQ ID NO: 619

SEQ ID NO: 4262 - DNA, 600 bp, Mesocricetus auratus
  misc_feature (125)..(149): n is a, c, g, or t
gcaggtgtcacggccatgggtgcagcgttgagcccgggaggcatgggctccatgggcgcgcagcccgcagcctctatgaacggcctggggccctacgcggccgccatgaacccgtgcatgagccnnnnnnnnnnnnnnnnnnnnnnnnngggccgcagccgcgctgggggcggcggcgacgccaagacgttcaagcgcagctacccgcacgccaagccaccctactcctacatctcgctcatcaccatggccatccagcaggcgcccagcaagatgctcacgctgagcgagatctaccagtggatcatggacctcttcccctattaccgtcaaaaccagcagcgctggcagaactccatccgccactcgctgtctttcaacgactgtttcgtcaaggtggcgcgatccccggacaagcccggcaagggctcctactggacgctgcacccggactccggcaacatgttcgagaacggatgctacttgcgccgccaaaagcgcttcaagtgtgagaagcagccgggggccgtaggcggaagcgggggcaccggctccaagggtggccccgaaagtcgcaaggacccctcgggaacaggtaac

SEQ ID NO: 4263 - DNA, 521 bp, Mesocricetus auratus; identical to SEQ ID NO: 621

SEQ ID NO: 4264 - DNA, 600 bp, Mesocricetus auratus
  misc_feature (210)..(227): n is a, c, g, or t
ttaccccagagctttgctgcattggaacagggccgcctctcaaggttataccgtggctagaattaaacttggagactaccatttctatgggtttggcactgatgtggattacgagactgcttttattcattaccgactggcttcggagcaacaacacagtgcccaagctatgtttaacctgggctacatgcatgagaagggcctaggcannnnnnnnnnnnnnnnnnttgcaaaacgcttttatgacatggcagccgaggctagcccagatgcacaagttcctgtcttccttgcactctgcaaattgggtgtcgtctatttcttacagtacatacgggaagcaaatatccgagacatattcacccaactggatatggaccagcttctgggacccgagtgggacctttacctcatgaccatcatcgcgctcctgttgggtacggtcatagcttacagacagagacagcaccaggatgtgccggtacccaggcccccagggccatggccagctcctccccagcaggaaggaccaccagagcagcagccaccacagtagcagccacacacccgcctgggtccgtgacctctagggagctgctt

SEQ ID NO: 4265 - DNA, 355 bp, Cricetulus griseus; identical to SEQ ID NO: 623

SEQ ID NO: 4266 - DNA, 600 bp, Mesocricetus auratus
agcgagcgccagatcaagatctggttccagaaccgccgcatgaaatacaagaaagaccagaaggccaaagggctggcctcgtcgtccgggggtccctctccggccggcagccccccgcagcccatgcagtccacggctggcttcatgaacgccttacactccatgacccccagctatgacagcccgtccccgccagccttcggcaaaggccaccagaatgcctacgcgctgccttccaactaccagccccctcttaagggttgcggcgccccacagaagtgccccccaaccccggcgtcggagtatgagccccacgtcctccaagctaacgggggcgcctacgggacgcccaccatgcagggcagtccggtgtatgtgggcgggggtggctacgcggatccgctgccgccccctgccggcccctccctctacggcctcaatcacctttcccaccacccctcggggaacctggactacaacggggcggcccctatgggccccaaccagcatcatggaccctgtgaccctcaccccacatacacagacctctcctctcaccacgcaccgcctcagggtagaatccaagaagcgcccaactga

SEQ ID NO: 4267 - DNA, 1378 bp, Mesocricetus auratus
  misc_feature (386)..(410): n is a, c, g, or t
tgtttcaaagtagaagtcttttagggacgcttctagttggtgagttgctctgctgaggcgggtgtcacttgaccctctaaccgccatgctaattactccaggtgcctgagcagagaggacttaaaaccaaaatggatgttcagattgtttacagggggatacatttaactaatgtgaattttttttctctaagaatgcagttgctaaatagataggtgcatatcttaatagcgttttaacaacttcattgaaaattaaaattgtcaatactactatacgccacatcaaccctttagtttagatgagcattgggccaaatgcaaagttagtacctcaggcacaaactcaactacaagtcagatcgatgatgtttcaaaataggcttnnnnnnnnnnnnnnnnnnnnnnnnnaggcatgctttttacacagaaaatggggcctcctggaagatgtttcttatattatttcaaagatatctataccaatattaattagttgtaatgttttctatttatatacttgtattcagtggggttttttttatcttttgaggaaacagagtttaatgtttcgtaaagtgtggggttgcgactgttaaattgactaggcgtgttgtatcagcatgtcttctgtttgatgattttcttttttacaaggacccaactacagatgagatttaaacttttacagtttttatatttcacacagcacatcaacttttgatgaatgttattttgtaacctttttagcaaagcaaaacataaaagcagtctttgaatggtggtgtttgctaactttgtatttgtaaaatgaaagcttctaagaccttgaaacttgaaactttgtcattaatgtagaaatatttaaaatctaaatgactaggggaacattattttgtggatgtaatttccattttaagacccagaatatattcttataagtcgtgtccactaaataggatgacacttttattcagtgtttaattcatatttatattttagaatatttttgtacaagatacagatttattttgtttgaggtgtttatactatcataaagttgtaaataattttctaagactgttttaatatggtccacaaatgtcctaaatatttttattgaggcatcttagaaataaccattcagtttcttcaaagacctaaacgaatgcattgtgaccacagctgtgtatatggctgatgccatggtaaagttatcttgccttttaaaagtggtggagttgatcagtgcatgcaaaagcatctctgaattgattgtataccatgcctaatatgacgagaaagtgcccagctgttgcaaggtgaggtgttaaagattctgcaagcactgtctagagaataaattcctgtatctctga

SEQ ID NO: 4268 - DNA, 600 bp, Cricetulus griseus
actcctggtgaagaaggggcgagtggggcaggactgggtcccagcaagcgtgtcttgggatccctgttgtctgactccctgtttcttgaagtgaaagagctcttcctggcagctgtgcgtctggaccctacatccattgaccctgacgtgcagtgtggcttgggagtcctcttcaacctgagtggggagtacgacaaggctgtggactgttttacggctgccctcagtgttcgtcccaatgactatttgttgtggaacaaacttggggccacactggccaacgggaaccagagtgaagaggcagtggctgcgtaccgtagagcccttgaactacagcctgggtatatccggtcccgctataacctaggcatcagctgcatcaacctcggggctcaccgtgaggctgtggaacactttctggaggccctgaacatgcagaggaagagccggggccctcggggtgaggggggcgccatgtcagagaacatctggagtaccctgcggttggccttgtctatgttaggccagagtgacgcctatggggcagctgatgctcgggatctgtctgccctcctagctatgtttggcctgccccagtga

SEQ ID NO: 4269 - DNA, 1400 bp, Cricetulus griseus
tagcagttatgtttgagtcccacacagccaatgaagatctgcctgacagcaatccttggacgctccagaaggaaactgggccatacctcctcaactgcactggatccaacttactctgtttcaactgacacttggagcagagctgtactgacttcaatcaagttgaggatttcaacctagatcttcaatcaagcaaatcccatctaacatggactggatataatccattcaagactttcaccatactaacattttcttcccacaagactccacgaggctacccccatcccatttcaacaggaagtaagttggaggatgctatgcccccgtcccccattattgtctattagggtagtataagcctagttgaggataacttactattgtttagggttgtgattggaaggagatgttcaggtttggatacctctttcagatgactttagggtttagctgaaatagacatggttaggatgtgcaatagcggattattatatcttcttgtatttcacttttatgattggtaattttggatactttacactattaagttttaatcctcttttagactaacaggggaattgtagggggacactgtaaccacacctcctaagggctggccacaggtgtgcatattgggtttttaagggggacccccttctctctggcctggctgcctttctgcctctagcacactctggcttgcatttgactgatatctgaataaagatatcttaaccttaaagaccacagaatcatcagctcttataataacagccagtaagtgtttcaaatatgaaaattaaaatacatacatgcttcaagaaaatcttgctacaaaacaaagcaaatcctcaaacattaaggaaagctctatcaggttcagcatgatcacaaattcaagaagaaattccaagcacccattccgatttgaggacagcccttgttccttattcaattaaaaagacactgcagggaacagtggcaatacacagctttcctctctcttacatacatgtggttaagtcctaggagcccaacatcaaggctaccagtctggctggactcctgggactcattgtgactatgatttgtctattggaattatccatgtgatcacagaggtaacacaatctcttgcttgcttttagaattttcaaaggatgaaatgaagacagatgtcttcaaaattccaaagtaagccttaggtttctttgtcccccaccccttttaaaatagtgttaaggatcaaactcagagttacacacagactagacatatgctacaacattaacctatatgcctagactccaagttttgttttttcttaacagaaacatataatcattagtaatcaacactagcaacatggaagaggtttatggaataaaaaataataa

SEQ ID NO: 4270 - DNA, 600 bp, Cricetulus griseus
gtctaaggctatattagcttctaagtctttgtactttggggtggggttataggcaatagagatggttccttttacctgcttcagactctgaaaagattggaacggaggaatgaggccgctgctttttggagggaggcccaaaatcaaccactacaggaagaagccacttggtaaggtttagtcttcctggcttggggctggggggcaattggaatcctgtagtgggggtgatgaggaacagaaggaaggaaggatgtcaaatctatgtctgtctttcattcttaggcatcaccattcttccttttcaggtctcttccactgtacttagaaacctgtttgagctggatccatccccctaactgtgaagctctccttaaggagtttggaacatctctgctataagtctcgtgattattagcttccttgtttccaggagcttgagctggggctcctgtggaccatctccatggggagggtttttttctgccttgtcctctttggataatatggctggagctgattgttcctaagtcactcctccactgatatgaggttggtggtcttgtgaaccttggtctacttattgccagtctagttcca

SEQ ID NO: 4271 - DNA, 381 bp, Cricetinae gen. sp.; identical to SEQ ID NO: 629

SEQ ID NO: 4272 - DNA, 417 bp, Cricetinae gen. sp.; identical to SEQ ID NO: 630

SEQ ID NO: 4273 - DNA, 600 bp, Cricetulus griseus
gtcagatctcttgcttgtgatgtcaaacctctatagccttaatgcaggatctttgaccatgagtgaaaagcgggagtttcctacagtacccttggttaaattaggaagttcctttaccaaggttcaagattacctaaggaggtttgaaagtatacctgacatgctggaattggatcacctcactgtttctggagatgtgacatttggaaaaaatgtttcattaaagggaacagttatcattattgcaaatcatggtgacagaattgacatcccccctggagcagtgttagagaacaagatcgtatctggaaatcttcgaatcttggatcactaagataagcgctgccggatacactttatactaattatgggttaaacagtttcttgtaataaaatgtcctctaagattctcaaatgagcaagtacttttactgtgcagtgttgattttttagagttttctgcaatgtgcttttagcctaaagagaagatagatggagcagtactgtccttttttgatgaagagcctagagatgagttcatctaaaagtgcaatattatttaatcgtagaactgggccagctcggcaatcttttaacaga

SEQ ID NO: 4274 - DNA, 1080 bp, Mesocricetus auratus
gccgccgcctctaccgccgcgacggtccgggccgcggtcgcccagggactttgaatatgtcggggattgccctcagccgacttgcccaggaaaggaaagcttggaggaaggaccacccttttggctttgtggctgtcccaacaaagaaccctgatggcacgatgaacctgatgaattgggagtgcgctattcctggcaagaaggggactccatgggaaggaggcttgttcaaactacggatgcttttcaaagatgactatccgtcctcaccaccaaaatgtaaatttgagccaccactgtttcacccaaatgtgtatccttctggcacagtgtgcctgtccatcctggaagaagacaaggactggaggccagccatcacgatcaaccagctctttataggaatacaggaacttcttaatgaaccaaatatccaagaaccagctcaagcagaggcctacacaatttactgccaaaacagagtggaatatgagaaaaggttccgagcacaagcgaagaagttttgcccctcctaagcagcggcacttgttgctcccatgacggaggaagggattggcttggcaagaacttgtttacaaacttttgcatatctaagtcgctgcgtacaagttactagtcacctgggagggttgagcgggcgccattttccatttctgccactggcatttacagtctcaattcgctgaattgccccagttttcatacagggtctcttccttcagtcttttgtatttttgattgttatgtaaaacttgcttttattttaatattgatgtcagtatttcaactgctgtaaaatgataaacttttgtacttggtaagcccctaggagctagtttcttcgcgctcggatgcaggcatgcttcccactgttctctggcctccagctggctgtatgacagatccacactgtccctctctccccatcctcgtcctcctcagaaacctgggctgttgcttatgagcctcagatccaaagttggccagcgtctccattctgcacctcttcctttgtgtttatatggcgttttgtctgtgttgctgtttagagtgaataaactg

SEQ ID NO: 4275 - DNA, 567 bp, Cricetulus griseus
tcaggagacgcctgaaggaaatgggattcatcatctatggcaatgaagattccccggtggtgcctttgatgctctacatgccagccaaaattggcgcctttgggcgggagatgctgaagcggaacgttggtgtggttgtggtgggatttcctgctaccccaatcattgagtccagagccagattttgcctgtcagcagctcataccaaagaaatacttgacacggctttaaaggagatagatgaagttggagacctgctgcagctgaagtactcacgccgtcggctggtgcctctgttggacaggccctttgatgagactacctatgaggagacagaagactgagcctttttggtgctccctagaggaggaaactccctcccaggacagtgtgtggcctttctgagccagttccagaaccacacttcagtgaccacctcatgtgaaagacatttccgaagctactgaaggtggacacctccactccaaatggcattttgtaaatagtaaaaaaagaaacaaactgcttcacattcttccattgtttgctaagtctcacctttatata

SEQ ID NO: 4276 - DNA, 1367 bp, Cricetulus griseus
  misc_feature (1309)..(1328): n is a, c, g, or t
acttggacaaggaagagaagtgccttcctcctccaagcatcagggttgtggtcacggtggagcagacagaggaagagctggagagggctgcgtccaccatcagggaggctgcccaggctgtgctgctgtagggtgcagcccggtgtttcctgccacatcacctgcgggcagaactgctcagactcctccagctgcccacggagtggattgctgcccgccatgcagctgtgacttgagttcacagacataactaatgaatggattttttttataaaggcaggagctgactttagaagaacacagatgacagcatataactgctatttactttgtgccattgggtctgtttggatgctttactatctgtcatttatattcatttttgtttcaaactggagcttcagttttcttctcccatctgtggtaatgatccaataagcactccttcgtattttgtagaaaaggacttagcagctaagaggagctctcgtgtaccacagttaactgtggcagagggagtcaactgcatcttcccagtccctcaggtagagctcaatggtggctgctatgcggagagcactttctgagagttagaaaattcatatagcatattggaatcctagagccttatatgcactagttattattgatgttgtcatttctaatgtgagcttctcttaatagaaaaatattcatactgcttcctaagcaataatatgaatcaaacattattttatttttgtgtaattgactttatatttttatatattctctagtcggttttgtgaagagggttattattctggtccccaaatacagatcatgccctgggtatttttgaatttgtcagatgtcctttttcatggtggttttgtttgggagcatagaactgtgggctttttctaagctgagaaaagtgagaacttttttcatcctgtaaattgctgatgcctcagaaaaacaggatgctctgaaagtgaccttcgagctgtacactggctgctgttctccttggtgagcatgctgagcagtgtaaggcttgcgatacttgccatggagcatgtacatagaaggaaggccgccattccttctcgtgtgcatgggcagagaatcgggtcgctaaaggtcgattccttctcgtgtgcataggcagagaatcgggtcgctaaaggtcgttttatgatgtgcattcatgttacagtgaccggcatcttttgaagtgatctgtgacatttttaatgtttctatttcatacgtgccttgtgattgctgctgctgtgagggctatggtcctgttggggatgggtcnnnnnnnnnnnnnnnnnnnntgaaataaacctccaggagcccacattcctgaaaaagaa

SEQ ID NO: 4277 - DNA, 719 bp, Mesocricetus auratus
  misc_feature (50)..(66): n is a, c, g, or t
gggagccctggctatatcaacttaagctatgagaagtcacattctcaggnnnnnnnnnnnnnnnnnactgcattagtgcttacccctttgaagtggtaccagagcatgataaggcagccgtatccttcctatggttacgaacccatgggtggatggctgcaccaccaaatcatccctgtgctgtctcaacagcatccccagagtcacacccttcagcctcatcaccacctcccagtggtgccagctcaacagccagtggccccccagcaaccaatgatgccagttcctggccaccactccatgactccaacccaacaccatcagccaaacatccctccatccgcccagcagcccttccagcagcccttccagccccagcccatttcaccccagtctcatcagcccatgcagccccagtcacctctgcaccccatgcagcccctggcaccacagccacctctgcctccactgttctccatgcagcccctgtcccccattcttcctgagctgcctctggaagcttggccagcgacagacaagaccaagcgggaagaagtggattaaaaaattcagaaaatgagagaaccgaagtggatacttcggttgtttttaggaataactcaagaacacaatgatttgtgcctacaatcacttagtaaattctgtaactaaaaataagtatcattagcagataataaaatgttttaaaaatcaaaaaa

SEQ ID NO: 4278 - DNA, 1400 bp, Mesocricetus auratus
  misc_feature (431)..(464): n is a, c, g, or t
gtatgttggctcaggagaaagagctgcaggaggtcaggaccttgttcaggtccttcaccccgaaacacagagaggaattatccaagctgcagacaaagaccaaggtgacagtgctggagggagacattctggatgcccagtgcctgaggagagcctgccagggcatctccgttgtcatccacactgctgccgccattgacgtctttggtgccattcccagacagactgtcatagatatcaacctgaaaggtactcagcacctgttggatgcttgtataggagcccgtgtgcccgtcttcatctacagcagctcagtggctgtggctggaccgaactcctacaaagtgatcatccagaatggctctgaggaagaaaatcatgaaagcacatggtctgatccatacgcatacagcaaaaagatggctgagaannnnnnnnnnnnnnnnnnnnnnnnnnnnnnnnnngatggtggcactttgcatacttgtgccttaagactcccattcatctatggggaaaaaagcaaattcatttcagatacaatggatagagcactgaagaacaatggtctaattaacggttttagcagattctctgtgatcagctcagtgtatgtgaataatgcagcctgggcacacgtcctggctgccaggggcctacaagaccccaagaagtcaccaaacatccaaggacagttctactacatctcagatgacacccctcaccaaagctatgatgatttatgttacactctgagcaaggactggggcctccgccctgattccagttggaaacctcctgtggccctgctgtactggtttggcttcctgctggaaactgtgagcttcctgctgcgtccggtctacaactaccagcctccctttaatcgccacttggtcacactcttaaatagtgtgttcaccttctcctacaagaaagctcagcgagatctgggctatgagccccttgtcagctgggaggaagccagggagaaaacttcagagtggatcgggtcactggtggagcagcacaagggaacactgaacataaaggctcagtgatgtgaagatggaggggacatgtcctgggtgctctcagctccttcagaaagggtctaagacacaatccaagtctttgacatactggccaacttgttttcagtcaccagaagccttgccagtcactggcccagctacaaaccttctgccctaaaaacctgcccagcaacatacaggctgtgcctcagctgctataaccaaaggctcagttgtagtgctgaactgcccagagcctcctgtaccttagaattgcatcagagcttccaattcccctcttgtctgagaaaatttccattgcttcatgaatctcaaggaaaagtacaataaaatcgtttaatgcct

SEQ ID NO: 4279 - DNA, 600 bp, Cricetulus griseus
gtttgcatacgtgtctacctgcccggaaagcagttgaagctactcaagtttgtagaaccaataaagattgcaaaaccagctcaagttcaagtttctgtatagtaccatcgttggaaactcatactcgattaataaaagtgaaacatccacctcaaattgatatgctgtatgtagggcacccactacatcttcactacacagtgagcatcacaagttttattccacgcttcaactttctaagcatagatctgccagttattgtggagacatttgtcaagtatctgatttctctttccggagctctggctatcgttaatgcagtgccctgctttgccctggatggtcaatggattttaaactctttcctggatgctacccttacctcagtgattggagacaatgatgtcaaagatctgataggatttttcatcttgcttggtggcagtgtacttttggctgccaatgtgacactgggactctggatggttacagcacggtaatatttgttctcatccaacagaaaatatggagtacaactatgtgggagtatcatttgctgttgaaattcctactaggtatgaagtgtaaagtgtttcctta

SEQ ID NO: 4280 - DNA, 275 bp, Mesocricetus auratus; identical to SEQ ID NO: 638

SEQ ID NO: 4281 - DNA, 523 bp, Mesocricetus auratus; identical to SEQ ID NO: 639
  misc_feature (27)..(27): n is a, c, g, or t
  misc_feature (348)..(348): n is a, c, g, or t
  misc_feature (395)..(395): n is a, c, g, or t

SEQ ID NO: 4282 - DNA, 600 bp, Mesocricetus auratus
  misc_feature (422)..(422): n is a, c, g, or t
cttctgtttgcagctcagagcattatgtgtgctcacactacgggaccccctcgataatttttaaaataatgcgtgttgggggcagaggaagtgagaaacaaaattaataccaaaatcatcaacactgtaaatgaataaggcataaaacataacataatatgtcacgttgccctaattttattcctggagtgtgagttttcatctcagtacactttaagtacaattatttacctgttatatacatatatatatatattcatgttcatttttggtccattcagtgctgaaatattgtatgttacatatgatagttcatgtctttgatagtggtacaattgttagactgtgcaacacacaaacatttcttaaattttgaagcagtactaaatcatgaatttcagaaattaattcctaagcctttnttgaatgtaaagcataaaaatacaaatcctcattttatacataggtttatagcaatagactgaaaccctgagtctatatcataattattactgatcctttggaagttttacatcatgtaccccaattctgctcacctcccaggtcctccatatctgccctcacccctgaagtgtccgt

SEQ ID NO: 4283 - DNA, 600 bp, Mesocricetus auratus
ggttcctcataacgccagaatttgtgatgacggctgcacactgcaaaggaaaagaaattactgtcacccttggagctcatgatgtgagcaaggcagaatccacacagcagaagataaaagtcaaaaaacaaatcgctcacccaaactacagcttctactccaaactgcatgacatcatgttcttaaagcttcaaaagaaagctaaagaagacccctctgtggacacaatccccctgcctagtccgtctgactttcttaaacctgggaaaatgtgccgggcagctggctggggaaggactggagtgacagaaccgacgtcagaaaggctgagggaggtcaaactgagaatcatggacaaaggggcctgtaaaaactattaccactatcattatgacttccaggtctgcgtgggcagccccagaagggtcagatcagcatacaagggagactccgggggacctcttctgtgtgctggggtggcccatggtattgtatcttatggacgtggagatgcaaagccccctgcagtcttcacccgaatctcctcatacgtgccctggattaatatagtcataaaggcaagcagttgaagagccagcc

SEQ ID NO: 4284 - DNA, 600 bp, Mesocricetus auratus
cattctaaaggcctctgtggactacatccgaaagttgcaacgagaacagcagcgtgcaaaggaccttgaaaaccgacagaagaagctggaacatgctaaccggcatctgttgctcagagtacaggagcttgagatgcaggcgagagcgcatggactttcccttatcccatcctctggcctctgctcgcctgatctggtgaaccggatcatcaagcaagaaccagttcttgagaactgcagccaggaacttgtgcagcaccagacagacctgacatgtacaacgaccctggatctcacggacggtaccatcaccttcacaaacaacctcggcaccatgccagagagcaaccccgcctatagcatccccaggaaaatgggctccaacttggaagacatcttgatggacgatgccctctcgcctgttggcgtcactgatccactgctgtcatcagtgtccccaggagcttctaagacaagcagccggaggagcagtatgagcgcagaagaaacggagcatgcatgttagcgagcccaccttgctctgcctctgcacaaactgcttcctctcttcttcagtagacttcataatttacctgaaga

SEQ ID NO: 4285 - DNA, 217 bp, Cricetulus griseus; identical to SEQ ID NO: 643

SEQ ID NO: 4286 - DNA, 222 bp, Cricetulus griseus; identical to SEQ ID NO: 644

SEQ ID NO: 4287 - DNA, 260 bp, Cricetulus griseus; identical to SEQ ID NO: 645

SEQ ID NO: 4288 - DNA, 192 bp, Cricetulus griseus; identical to SEQ ID NO: 646

SEQ ID NO: 4289 - DNA, 179 bp, Cricetulus griseus
ccggcagcgctgtgtcaacaccaagggcggctttgaatgtctctgctatgatggctttgagttggtggatggagagtgcgtggagctcctggatccgtgctacggatctgactgcgaatatcagtgccagccagtgagtcccagagagtacatttgcatctgtgcttgagggcttcgca

SEQ ID NO: 4290 - DNA, 600 bp, Cricetulus griseus
  misc_feature (207)..(306): n is a, c, g, or t
  misc_feature (365)..(434): n is a, c, g, or t
ggttattgtcgtacaagcatgaagacctgagctcgaagcctggcacccatgtaaaaagaaaccatgcatggtagtgtgcatcttcaatcccagcattggggagacagagaaagagaaagggacatccctagagcttcctggtcagccagccttggcaagccagtgaactccaggttcagtgagagacctgtctggggaggaaaaagnnnnnnnnnnnnnnnnnnnnnnnnnnnnnnnnnnnnnnnnnnnnnnnnnnnnnnnnnnnnnnnnnnnnnnnnnnnnnnnnnnnnnnnnnnnnnnnnnnnntgaggaagatacctgatatcaacctcacacactcatgtacccatgtatgtaggtacctnnnnnnnnnnnnnnnnnnnnnnnnnnnnnnnnnnnnnnnnnnnnnnnnnnnnnnnnnnnnnnnnnnnnnngatggtgttgaattctaaggctcttatccacacatatatggagacaaatagaagaattacagtcgtccctgcctttgacgctactctgtttctccaaccctgcttcccagatatttttcaacatctactcagccttgagtggttgcactctgaccccaggacctct

SEQ ID NO: 4291 - DNA, 240 bp, Cricetulus griseus; identical to SEQ ID NO: 649

SEQ ID NO: 4292 - DNA, 172 bp, Cricetinae gen. sp.; identical to SEQ ID NO: 650

SEQ ID NO: 4293 - DNA, 272 bp, Mesocricetus auratus; identical to SEQ ID NO: 651

SEQ ID NO: 4294 - DNA, 600 bp, Cricetulus griseus
gggcttcagccaggcctcgcatctcctggcacatcagagaggccacactggggagaaaccctacaagtgtggcacgtgcggaaagggattcagccggagttcagatcttaatgtccattgtcgaatccacacgggagagaaaccctacaaatgtgagaggtgcgggaaggccttcagtcgagtgtcaattctccaagtgcatcagagggtccacagtgacgagaaaccctatcagtgtgacgcgtgtgggaagggcttcaccgtggagtcacaccttcaggctcaccagaggtcccacactggagaaagaccctatcggtgcgaggagtgtggcagaggcttctgcagagcttccaactttctagcccaccgtggagtccacactggagagaaaccctaccgatgtgacctgtgtggcaaacgcttccgccagaggtcctacctccacgaccaccaccgggttcacactggcgagaaaccgtacaagtgtggggagtgtggcaaggtcttcagctggagctcctacctcaaagcccaccagagggttcacactgggcagaaaccttaccgatgtgaggcgtgcggcaaagggttcagctg

SEQ ID NO: 4295 - DNA, 600 bp, Cricetulus griseus
  misc_feature (225)..(244): n is a, c, g, or t
attgccaatctgctcaaagagaaggagaaactggagttcattttggcagcccaccgacctgcttgcaagatcccggatgacctgggcttcccagaagagatgtctgtggcttccctggatttgactgggggtctgcctgaggccactaccccagagtccgaggaggccttctcactgcctcttctcaatgacgctgagcccaagacatcactggagccagtcaannnnnnnnnnnnnnnnnnnntgaaggctgagccctttgatgacttcttgttcccaccatcatccaggcccagtggctctgagacgacggccagatctgtgccagacatggacctatccggttccttctacgcagcagactgggagcctctgcacagtagctccctggggatggggcccatggtcacagagctggagcccctgtgtaccccggtggtcacctgtactcccagctgcacaacttacacgtcttcctttgtcttcacctaccccgaggctgactccttccccagctgtgcagctgcccaccgaaagggcagcagcagcaacgagccctcctctgactcactgagctcacccacactgctagccctgtga

SEQ ID NO: 4296 - DNA, 90 bp, Cricetulus griseus; identical to SEQ ID NO: 654

SEQ ID NO: 4297 - DNA, 600 bp, Cricetulus griseus
cctcaggccaaagccaagacccaagcagcaggacccagctcgccccagagaccacccactccaaaagagaccaaatcgccctcaccagaaccccaggacaatagtgacactgaaggggaacagtcagaaggacaggacaatggggcggaagattccggagacaccgaggatgagctgaggagggtagccgagcagagggagcagaggcagcccccagctccaggggagaatggtgaggacccatatgctggctccacagacgagaacacagacaacgaggcttccacagaggctgacctgccaattccagagctcccagacttcttccagggcaaacacttcttcctgtacggggagttccctggggacgagaggaggaagcttatccgatacgttacagctttcaatggtgaacttgaggactacatgagcgagcgggtccaattcgttatcacagcccaggagtgggaccccatctttgaggaggccctgatggagaacccttccctggccttcgtccggccccggtggatctacagttgtaatgagaagcagaagttactcccccaccagctctatggagtggtgccacaggcctga

SEQ ID NO: 4298 - DNA, 600 bp, Mesocricetus auratus
ttttaactcaagtagcttagatgtcgtgaatggaggggacctcgtctttaatatcttgacgaactggcaaaaggctggtgacacaaaaatcattgagagccagatcgtctccttctacttcaaactctttgaagccttgaaggacaaccaggccatccagaggagcatagacaccatcaaggcagacctgtttgctaacttcttcaacagcagcatggagaaactcaatgactttgtgaagctcaccaagattccggtaaatgaccttcaggttcagcggaaagctgtcaatgaactcatcagtgtgatgcctcacctgtcacgaaaacttagcctaaggaaacggaaaagaagtcggtgctgttttgggggtggaaatcgtcccaacaagaatattcttgccagcaatatttgaatttaaaacttaaacctatttattaatatttaacattatttatatggaaatttatatttttagaataaccaaccaaagaagtatttatgatagcaacttttctgtgatgaaaatgaatttctattaatatatatatgttatttataatttctgtatcctcaactatctcacctgaccatttattg

SEQ ID NO: 4299 - DNA, 80 bp, Cricetulus longicaudatus; identical to SEQ ID NO: 657

SEQ ID NO: 4300 - DNA, 1349 bp, Cricetulus griseus
  misc_feature (814)..(841): n is a, c, g, or t
atgggaaatgaagcctacaagaagaaagacttcgacatggccttgaagcattatgacagggccaaggagctagaccccaccaatatgacttacataactaatcaagcagctgtgcactttgagaaaggtgactacaacaaatgccgggagctgtgtgagaaggcgattgaggtgggcagagagaaccgagaggactaccgacagattgccaaagcttatgccagaatcggcaattcctatttcaaagaagaaaggtacaaggatgctatccatttctacaataagtctctggcagagcacagaactccagatgtgctcaagaagtgccagcaggcagagaaaatcctgaaggagcaagagcgactggcctatatcaaccctgacttggctttggaggagaagaacaagggcaatgaatgcttccagaaaggggactacccccaagccatgaagcactatacagaagccattaaacggaacccaaaagatgccaaactgtatagtaaccgagctgcctgctacaccaagctcctggagtttcagctggcactcaaggactgtgaggagtgcatccagctggagccaacctttatcaagggttacacacggaaagcagccgccttggaagccatgaaggactatacaaaagctatggatgtgtaccagaaggcgctagaactggactccagctgtaaggaggcagcagatggttaccagcgctgtatgatggcacagtacaacagacatgatagccctgaggatgtgaagcgacgggccatggctgaccctgaggtgcagcagattatgagtgacnnnnnnnnnnnnnnnnnnnnnnnnnnnntgcaaaaggatccccaggctctgagcgaacacttaaagaaccccgtaatagcacagaagatccagaagctgatggatgtgggtctgattgcaattcggtgataacttgcttttcccctcttcccttcgccaatgtggaaaggcgagctgggacggtggcgagcagcactgggcagagggggggggaagaaaggcttatctttatatttatacatgcctgcaaggaagacagactcatccagcgccacctcggaccctctcagcacacgcatggtctcttcactgctgcccttgagtgtccttccctgtcctacccaaacacccccacccccctgccccacccccgtcactgtctcggctgctcccctatagttggttattttttatttggggcagtgggttcatacggggaggggagggaattcttccctacctggggtcccagctgtcttcacttgttgttaccccacgtccttcaataaaacaagccagtcaggcgtggttatatg

SEQ ID NO: 4301 - DNA, 600 bp, Cricetulus griseus
  misc_feature (328)..(345): n is a, c, g, or t
aaattaagagttatgtgaattatgtgctaagtgaaaaatcatcaacctttctaatgaaggcagcggcaaaagtagtagaaagcaaaaggacaagaacaataacttctcaagataaacctagtggtaatgatgttgaaatggaaactgaagctaatttggatacaagaaaaagtgttagtgacaaacagtctgcggtaactgaatcctcagagggtacagtatccttattgaggtctcacaagaatcttttcttatctaagttgcaacatggaacccagcaacaagaccttaataagaaagaaagaagagtaggaactcctcaaagtannnnnnnnnnnnnnnnnngcagaagagccactgaaagcagaatacctgtttcaaagagtcagccggtaactcctgaaaaacatcgagctagaaaaagacaggcatggctttgggaagaagacaagaatttgagatctggcgtgaggaaatatggagagggaaactggtctaaaatactgttgcattataaattcaacaaccggacaagtgtcatgttaaaagacagatggaggaccatgaagaaactaaaactgatttcctcagacagcgaag

SEQ ID NO: 4302 - DNA, 392 bp, Mesocricetus auratus; identical to SEQ ID NO: 660

SEQ ID NO: 4303 - DNA, 399 bp, Mesocricetus auratus; identical to SEQ ID NO: 661

SEQ ID NO: 4304 - DNA, 416 bp, Mesocricetus auratus; identical to SEQ ID NO: 662

SEQ ID NO: 4305 - DNA, 1377 bp, Cricetulus griseus
ggaagagccggacagctacacggaatgtacagatggctatgagtgggacgcagacagccagcactgccgggatgtcaacgagtgcctgaccatccccgaggcctgcaagggcgaaatgaaatgcatcaaccactatgggggctatttgtgtctgcctcgatctgcggctgtcattaatgatctacatggcgaaggccctccaccaccagtgccccctgctcaacaccccaatccttgcccaccaggctatgaacctgatgaacaggagagctgtgtggatgtggacgagtgcgcccaggctttgcatgactgtcgccctagccaagactgtcataacctgcctggttcctaccaatgcacctgccctgatggttaccgaaaagttgggcccgaatgcgtggacatagacgagtgtcgctaccgatattgccagcatcgatgtgtgaacctgccaggctcttttcgctgccagtgtgagccaggattccagctgggtcctaacaaccgttcttgtgtggatgtgaatgagtgtgacatgggagccccatgtgagcaacgctgcttcaactcctatgggaccttcttgtgtcgttgtaaccaaggctatgaactgcaccgggatggcttctcctgcagtgatatcgatgagtgcagctactccagttacctctgccagtatcgctgtgtcaatgagccgggccgcttctcctgtcactgcccacaaggctaccagctgctggccacaaggctctgccaagacattgacgagtgtgaaacaggtgcacaccagtgttctgaggcccaaacctgtgtgaacttccatgggggctaccgctgtgtggacaccaaccgttgcgtggaaccctatgtccaagtgtcggacaaccgctgcttctgccctgtctcgaaccccctgtgtcgagagcaaccttcatccattgtgcaccgctacatgagcatcacctcagagcgaagtgtgcctgcagacgtgtttcagatccaggcaacctccgtctaccctggcgcctacaatgcctttcagatccgtgctggaaacacgcagggggacttctacattaggcaaatcaacaatgtcagtgccatgctggtccttgccaggccagtgacaggaccccgggagtatgtgctggacctggagatggtcaccatgaactctcttatgagctatcgggccagctctgtactgagactcaccgtctttgtgggagcctacaccttctgaaggagaccctcagggaagggctgggtggggcccccctctttctccctctcatagcttaaggagcctggggttgaggagtgactgttctgcttaaagagacaatgatgtgaaggacaataaagggagaaaggagg

SEQ ID NO: 4306 - DNA, 903 bp, Mesocricetus auratus
actcagagactattggagaactccagggaggtcacccacaccgttcaggatgaaaactgtagtgctggccgtggctgtgctcttcctgaccggaagccaggctcggcacttctggcagcgagatgacccccagaccccatgggacagagtgaaggatttcgccactgtgtatgtggatgcggtgaaagacagcggcagagaatatgtgtctcagtttgaaacctccgccctgggcaagcagctgaacctgaatctcctggagaactgggacaccctgggctcaaccgttggtcgcctgcaggaacagctgggcccagtgactcaggagttctgggataacctggaaaaggagacagaatggctgaggcgggagatgaacaaggacctggaggaggtgaaggcgaaggtgcagccctatctggaccaattccagaccaagtggcaggaggaagtggctctttaccgccagaagatggagcctctgggcgccgagctgcgcgatggtgcgcgccagaagctgcaggagctgcaggagaagctaacccctctgggcgaggatcttcgtgaccgcatgcgccaccacgttgacgctctgcgcacaaagatgacgccctacagcgaccaaatgcgcgaccgcctggctgagcgcctggcccaactcaaggacagccccaccctggctgagtaccacaccaaggccgctgaccatctgaaggcgttcggcgagaaggccaaacccgctctggaggacctgcgccagggcctgatgcccgtgtttgagagctttaagaccagaataatgagtatggtcgaggaagccagcaagaagctgaatgcccagtgaggctcccatcttcataccccacccctacattggctttcttagaataaacctttccaaag

SEQ ID NO: 4307 - DNA, 171 bp, Mesocricetus auratus; identical to SEQ ID NO: 665

SEQ ID NO: 4308 - DNA, 600 bp, Cricetulus griseus
  misc_feature (187)..(187): n is a, c, g, or t
  misc_feature (197)..(197): n is a, c, g, or t
  misc_feature (307)..(307): n is a, c, g, or t
gtcctccattgtgtttgttattcgtggatcctgaatgatcatgatctgcagcttagtccttgaggttctaatggctttcccaccaactccacctttcacacaacacagcccaagtttctcattgtgtccagcccctgcccccgcttcttttggacaagagttggattaaagcaaaccaccttggcancttttgtaanccccaatagcagtttcggacagcactgaccagtaggcatggtgcccggagcccaagctgaggacctgcctgccttgctctcatttcgcttacgatagagcattttccctncagcaactaataacgtttatttggtttggaaacttaggtttcctaatccacaagagacagactgtccagaaatgctgggtggtcctcagcgtgtccaattccaacagcttcagaccagcacgtcagcccagcaactgcctcagctggagcctttccatggatgctttcctgtggagagccatccgccacatgtccacaaaggaggctgattcagtgagccatgcagactgatgctccacaccctgcaccctcccagcttgaacagttccccacatggctgtgtggccttttag

SEQ ID NO: 4309 - DNA, 138 bp, Mesocricetus auratus; identical to SEQ ID NO: 667

SEQ ID NO: 4310 - DNA, 131 bp, Mesocricetus auratus
  misc_feature (78)..(78): n is a, c, g, or t
tgttgccacaagggttcaaaaatagccccaccctctttgatgaggccttacatcaggacttggccggatttagagtcnaccaccctgaggtcctcctcttacaatccatggatgacctcctgctggcctcc

SEQ ID NO: 4311 - DNA, 138 bp, Mesocricetus auratus; identical to SEQ ID NO: 669

SEQ ID NO: 4312 - DNA, 110 bp, Mesocricetus auratus
atagcccaactttgtgtcaatattttgtgcataaacctctggaaataattcttaaaaaatttccacatttgttaatatatcattacatggatgacatcctgctggcctcc

SEQ ID NO: 4313 - DNA, 204 bp, Mesocricetus auratus; identical to SEQ ID NO: 671

SEQ ID NO: 4314 - DNA, 600 bp, Cricetulus griseus
gtggcagaatttgactcctttgtcctggtaacagcctacgttcccaatgcaggcaggggtctggtaaggctggagtaccgacagcgttgggataaagccttttgcaagtttctgaaggacttagcttcccgaaagcctcttgtgctatgtggggatctcaatgtggctcatgaagaaattgaccttcgtaaccccaaaggaaacaagaagaatgctggctttactccccaggagcgccagggctttggggagttgctacaggctgtaccacttactgacagcttccggcacctctaccccaacaccccctatgcctataccttttggacttacatgatgaatgctcgggctaagaatgtcggatggcgccttgattactttttgttgtcacactcccttttgtcttccttgtgtgacagcaagatccgctccaaagctcttggcagtgatcactgtcccatcaccctttacctagcactgtgacacccctgctgaagtaacttacacctgggaaatagcctcctctcaagtccagtgtcctttaggccccggggttttgattttttgtgtaccccctgttttaaatgttaaaccaagctt

SEQ ID NO: 4315 - DNA, 1113 bp, Cricetulus griseus
gggcggcgacggtttcctggtggccgcgcgctgctctgtgagcggcgggtggcagacggacctgggccctcaccccagacgcaccgcggatctggcatggctcacctgatgacaatgcagttgctgctcctgctgatatgggtatctgagtgtgcccaatcaagagctactcgggccagaactgaactgctcaatgtttgcatggatgcaaagcaccacaaagaaaagccaggccctgaggacaatttacacaaccagtgcagtccctggaagaagaattcctgctgttccaccaacacaagccaggaagcccacgaggacatttcctacctgtaccgattcaactgggaccactgtggaaagatgacattggaatgcaagcgacactttatccaggatacctgtctctatgagtgttctcctaacttgggaccctggattcagcaggtggaccagagctggcgaaaagagcgaatccttgatgttcctctgtgcaaagaggactgtcagcgatggtgggaggactgccgcacctctttcacctgcaagagcaactggcacaaggggtggaactggacctcggggtataaccagtgccctgtgggagcctcctgtcgccacttcgacttctatttccctacacctgctgctctgtgtgaggaaatctggagtcactcctacaaactcagtaactacagccgagggagtggccgctgtatccagatgtggttcgacccagcccaaggcaaccccaacgaggaagtggcaaggttctatgctgaggccatgagtggagctgggcttcacggggcctggccactaatgtgcagcctgtctttagtgctgctctgggtgttcagccgagttcctttaaccttctgatccccaggaactccctgccgggcttagactcccagctcccaacctcctttgtggtggggcctctgacaggcattcaatatctctcttatgaattatttgggtgtgaatgggaatataattattttgcatcctacttaccactgattgaagttgtttaaacttggttagttccctgctctaacacttactgtgggcaagttaaataaacttaattttcctgtgctgttccac

SEQ ID NO: 4316 - DNA, 600 bp, Mesocricetus auratus
  misc_feature (116)..(136): n is a, c, g, or t
tcctttgcaggattttcaagtgcttttagttgctgagccatttttccagcctttgaacaaaattttaataattggctttaaaagttctcccttgaataaggtggtagtggtacatnnnnnnnnnnnnnnnnnnnnnaaggcagagttggtgtatatttgtgagttcgagggcatcctggtttacaaagcaaattccaggacagccagagctcttatacagagaaatcttgtcttgaaaaaccaaaaaagtttttccttggttaaaaacaacagcaatttttcaattgtttatttttgagataggttctaatgtggtctagtttgctatacagctgaggctgggtcctgaactcctgatctttctggttatatctctcaagtgctgggatcacaggcatgcaccaccatacctggctcactctaacatatgttcatttggtcaaccctttttattctcagaaggaggaattgtcctaccacacagcagaaaccaaattctaatttttgatgttactttaatgccaagtacaattcagattacagttggggggagctgactattcaaagacctcatgcagcataaataatggctgaccaacc

SEQ ID NO: 4317 - DNA, 600 bp, Mesocricetus auratus
  misc_feature (355)..(394): n is a, c, g, or t
accaaggaagtagaatacattgtatcaactaacactgttgttttagccaatgtcctggaaggcggggacccaaccttcccacagctcacagcgtcccctcacagcatggacagcatgctgccctctggagaaggtggcccaaagaggactcatcccactgttccaggcattccagggggaaccagagctggggcaggaaaaataggtcgaatgattgcagaagaaatcatggaaatccacaggataagagggtcatcaccttccagctgtggctccagcccgctgaacatcacaagtacacctccccctgatgcctcctctccaggaggcaagaagattctaaatggagggactnnnnnnnnnnnnnnnnnnnnnnnnnnnnnnnnnnnnnnnnaagagaccccaggttatccatattctgatagttcttctattcttggtgagaacccccacataggcatcgatatgatagacaacgaccaaggatccagtagtcccagtaatgacgaggcagcaatggctgttatcatgagcctcttggaagcagacgcgggcctgggtggtcccgttgactttagcgacttgccatggccactgtag

SEQ ID NO: 4318 - DNA, 600 bp, Cricetinae gen. sp.
agagcactggaaaaagatccacaaccaagtggtggagagtggctatgaggtcctccggctgaagggctatacatcttgggctattgggctgtccgtgacagatctggcaagatcaatcctgaagaatcttaggagggtgcatcccgtttccacactggttaagggcttatatgagataaaggaagaaatctttctcagcattccttgtatcttgggacaaaacggcatcacagacattgtgaaagtgaacctgaatcccgaggaggaggcccttctcaggaagagtgcggaaacactctggaacgtccaaaaggacctcaaattgtaaagtttcagaattcgactgctgagcagatatgtgattgcgtattgcacatctcaaacctttccaaataataaatagttgaacaaactatcagagacctatgacataacagcatcctgttgagatgagacagacacagacgtttcctccttcccctctcttcgctacagagccctggctgcctggagctgcagactcagctcgcctcagagatctgctaacctcgaagttaagggcgtgcaccaccatgaccagctgaagtctctgcctttttc

SEQ ID NO: 4319 - DNA, 90 bp, Mesocricetus auratus; identical to SEQ ID NO: 677

SEQ ID NO: 4320 - DNA, 572 bp, Cricetulus griseus
  misc_feature (507)..(542): n is a, c, g, or t
ctgggcttcactttaatttggaagaatgtgcctaagacacagatgaagttcagcgtacagacaatgtgccccatcgaaggagaagggaacattgcacgattcttgttctctctgtttggccagaaacacagcgctgtcaatttaaccctcattgacagctgggtggatattgccatgtttcagctgaaagaagggagcagtaaagagagagcagctgttttccgctctatgaactctgctctggggaagagcccatggctggttgggaacgagctcaccgtggcagatgtggtgctgtggtccgtgctacagcaaactggggatggcagtggggtagcacccgccaatgtgcagaggtggctgaagtcctgtgagaaccttgtccccttcagtactgccctccagctccttaagtaagttctagcagcttgtcttacagggttcaacataagaatgatacagcttcaagtttgttgtcaggaaagggacttgtcctagaatcacaannnnnnnnnnnnnnnnnnnnnnnnnnnnnnnnnnnnagataatctgtggattttattttaagtcag

SEQ ID NO: 4321 - DNA, 1377 bp, Cricetulus griseus
agactttcaaggaccaaggattggaggtcttaaaacaagagacagcagttgttgaaaatgttcccattttggggctttatcagattccagctgaaggtgggggccggatcgtgttgtatggagattccaattgcttggatgacagtcacagacagaaggattgcttttggcttctggatgcactccttcagtacacatcatatggcgtgaaccctcccagcctcagccattcagggaaccggcagcgcccacccagtggagctggcttggcccctcctgaaaggatggaaggaaaccaccttcatcgatactccaaggttcttgaggcccatctgggagacccaaaacctcggcctcttccagcctgtccacacttgtcatgggccaagccacagcctttgaatgagactgcgcccagtaatctttggaaacatcagaagctgctctccattgacctggacaaagtagtgttacccaactttcgatcgaatcgccctcaagtgagacctttgtcccctggagaaagtggtgcctgggacattcctggagggatcatgcctggccgctacaaccaagaggtgggccagaccatccctgtctttgccttcctcggagccatggtggccctggccttctttgtggtacagatcagcaaggccaaaagccggccgaagcggaggaggcccagggcaaagcgtccacagcttacacagcagacccacccaccaaggaccccgtcagtgtgatcatcacagtggccagccacagaagccaacaagccttggaccactctgatggccacacagggcatcagaagagcatcctgggaggtgcctatttccaagggaccccatctccagcttgtggctgggttagtgtgttctccccaggcatctctgagttacatcctgaagtacctcactgtgctgggctcttgacaggaggtgctcagtagctcagcctccagtggtgtcagcaggcccagtgacagtgcaccaaagacacagagcctggaagggctgtcgggacacactttctacataaagcttacaatcctgaccaagcgaagaaatgcttgttacaggctattttctatatttattgtggggagagtcactttaaagacttgtactgtttggaagcaaagctgttgtgtttgtcagttgagtgcagttttctgcagtgacatcataaggagtcagatcccatgacctttttgatgagaggacagactgaactgaagggcatgtgcacagatctgggaaatgcaagccttcgctttatttttataagtatcaactgccatcatgttttgtaatttggggtcttgatttcaccattgttggtgaaagaaattttcaataaatatgcataacc

SEQ ID NO: 4322 - DNA, 579 bp, Cricetulus griseus
atgggtatgagccagaaatcttaatgagaagaccactagagcctttcctggcccccaaaatcaaaccccatggagaagccagcatttgatgtccccaacttctgctctggagagactatgctgggaccatgtactactgagcctgagatagggatgcaggtggagacaggcccaacttctactcctttattcctaaatacagactgttgaatatactgaccctgagcctaaggaggtttgggggaatgagatctataggttttaacctcaacctgcccatacctacagggtcccaatatggatattgtaggtaaccttcacaccagtctccagtttagaataccccaacaagaaagaagttaatcatagtggtttcctttgcacctattaccaccccagttcaatccaggaagggacttggttaaacctttctcaattgggtttgtggatgcctccaagccaagtcactagagtacagtgagtgaacccagcctcctacctgtcccaagatgcccttccccatcttgaccgtgctaactgtgtgtacatatatattctacatatatgtatattaaaccc

SEQ ID NO: 4323 - DNA, 353 bp, Cricetulus sp.; identical to SEQ ID NO: 681

SEQ ID NO: 4324 - DNA, 360 bp, Cricetulus sp.; identical to SEQ ID NO: 682

SEQ ID NO: 4325 - DNA, 496 bp, Cricetulus sp.; identical to SEQ ID NO: 683
  misc_feature (39)..(64): n is a, c, g, or t
  misc_feature (66)..(79): n is a, c, g, or t
  misc_feature (84)..(121): n is a, c, g, or t
  misc_feature (171)..(190): n is a, c, g, or t

SEQ ID NO: 4326 - DNA, 304 bp, Cricetulus sp.
cagaacccacgacagtacaagatcccagactggttcttgaacagacagaaggacgtgaaggacggaaagtacagccaggttctggccaatggtctggacaacaagctgcgagaggacctggagcgactgaagaagatcagagcccacagggggctgcgccacttttggggtcttcgtgtccgaggtcagcacaccaagaccactggccgccggggccgcactgtgggtgtatccaagaagaaatgagycgctgggccttcactgttaataaatagtttatatgcctgtgaaaaaaaaaaagctt

SEQ ID NO: 4327 - DNA, 579 bp, Mesocricetus auratus
  misc_feature (221)..(249): n is a, c, g, or t
gggcatgattaaccgtggagtggcaggatccattgtcaacatctccagcatggtggcctatgtcaccttccctggtctggccacgtacagctccaccaagggtgctataaccatgctgaccaaagccatggccatggagctgggaccatacaagatccgggtgaactctgtaaaccctaccgtggtgctgactgacatgggcaagaaagtctctgcagacnnnnnnnnnnnnnnnnnnnnnnnnnnnnnccacccactgaggaagttcgcagaggtggaggacgtggtcaacagcatcctcttcctgctcagcgacagcagcgcctctaccagcggctctggcatcctggtggacgctggttacctggcctcctagacggcccaggtgcaggggactcctggagacttccctggcctcacccttacatcaagaccccgccttcaacccaacccaataattttgttcgaatcctgtagagccccaccccacacacatccatccccaactttagactccgggatcccgccattccataccagctatgctgagataatttgattaaataagtatcccaaacc

SEQ ID NO: 4328 - DNA, 1400 bp, Cricetulus griseus
tatcccatgaccaacccggccccccagctcctgatagctccacaggaccagcctccaccccaactacccctgtccccagacccttcctcatcttactgtggacatggcccttccacagcccactgactctgtacccctgttccaagatgctcccaggcaccgccgactgccagatgactgtcaaccggagcttgtacccccaagcagatgcagtcatcttccaccaccgagaaatcagccccaaccccaggtcactgctgccaagtcagccgaggccgccaggccagcgctgggtgtggttcagcctggagtcacccagccactgcagcaggctgtcagccctggatggacacttcaacctaaccatgtcctatcgcagcgactctgacatcttcacaccctatggctggctggagccgtgggcagagcctccagtccaaacccaggtcaacatgtctgccaagactgacctggtggcctgggctgtgtccaactggaaccccaagtcggctcgggtgctgtactatcagaagcttcagagtcacctccatgtggacgtgtatggccgaggacatatgcccctttcccgaggggacatgatggggacgctggccagatacaagttttacctggcgtttgagaactcacttcacccagattacatcacagagaagctgtggaagaatgctctggaggcctgggctgtgcccgtggtcctggggcccagcaggaagaactatgaacgcttcctgccccctgatgccttcatccacgtggatgactttgagagcccagcagacctggctcagtacctgcagaagctagacaaggacagccagagctaccagcgctacttccgctggagggagacgctcaggcctcgcttgtctagcatggcccttgccttctgccaggcatgcaggcagctgcagtgggaccagaggtaccagacggtccacagtgtggcctcttggttccactgaggtggctggccagagtcctgcaggcagtgtcccactcaaaattcatcctctgttgcccctgtgttgtgctctatcgtgctgggtagttttatttcaatttgatacaaactagagtcatgtgggttgatggagccacaattgagagaatggcaccaccagattgacctgcagggcattttcttaattagtgattgatggtaaggcctcagctcactgtgggtggtaccatccctgggctgcttgtcctgggttctataagaaagcaggctgagcaagccatggggagcaattcagtaagtggcctctgcctcagctcctgcctccaggttcctgcctgactctgtgaatgatggagtgtgactgagaaatgtaagctgaaataaaactaaagttacttagccatcatggcattttagc

SEQ ID NO: 4329 - DNA, 600 bp, Mesocricetus auratus
gagccagccagccgtgcgccgggctgtgctcatgtgcgaggacgcactggtgcccttctatgagaaatttggcttccaggcggtgggcccgtgcgccgtcaccgtgggctccctcaccttcatggagctacagtgctccttacggtgccatgccttcctgcgcaggaacagcggctgctgacccaagctgcccactcggccacggagagggtggggagcagcaggcttggggttcctaattcccacgccacaccctcctctgcctagagcccatccaagtagagctggctagcatgaagggagagacggcagccgccagctggagtgcagaggtaaggatcaatgcagagggcaggaggtggccctgcctcagcacaggctgccatctgtccccaaaggacctcttgcattctgaactgtgcacaaagccaagaccaggatgggaaaccagagcggtgggaggtctgtccccacacacttctgcctctaccagctctgtttccgcaccccagtgcagcgccctgattcttggggtccttgctctccccagactgacaccccttcctggatcctaactgggaatgaggggcagccaggagc

SEQ ID NO: 4330 - DNA, 1400 bp, Cricetulus griseus
  misc_feature (320)..(334): n is a, c, g, or t
ctcgtcagtattgaaacagaagatgagcagagactgatagaaaaattcattgaaaacctcttggcatctgatggtgatttctggattggcctcaggaggctggaggtgaagcaggtcaacaacacagcctgccaggacctttatgcttggacagatgggagcacatcacaatttaggaactggtatgtggatgagccttcttgtggcagtgaggtctgcgtggtgatgtaccatcagccatcggcaccacctggcatcgggggctcatacatgttccagtggaatgacgaccggtgcaacatgaagaacaatttcatttnnnnnnnnnnnnnnnagaagccaagtacaacaccttctataaggcctggaggtgaagcaactgagccaccaacaccagtacttccagaagaaacacagaaagaagacaccaaagaaacattcaaagaaagcagagaggctgctttgaatcttgcctacatcctaatccccagcattcccctgttcctcttactagtggtcacttcagctgcatgttgggtttggatctgtagaagaagaaaacaagagcagccagatcctaccacaaaggagcaacacaccatttggcccactcctcaccaagaaaacagccccaacctagatgtttacaatgtcatcagaaaacaaagcgaagctgatttaactgagccccgcccagacctgaagaacatctcatttcgggtgtgttctagtgaagcccctcctgatgatatatcttgtgactatgacaacatggctgtgaacccttcagaaagtgggtttgtgactctggcaagtatggagagtggatttgtgaccaatgacatttatgagttctcccctgacagaatggggaggagcaaggagagtggatgggtggaaaatgaaatatattactaagacatatgaaaaactggcaaaaatgagaaaacaaaagcaaaagcctcctatttctcacaaggaaaatgttcagaaagtttatgaagatgctcagaccagttcttaaggtgagcacagaatctccacaagttcctactggggtccccaagttctggtatgtatcccttatcccagagcctcacccagctcagccttgtgagaaggcaccttgcctaggggctgccatacagcagaccctcaataactgtcagccagtgtgctgcaactgatgttcaagggctgatgcttccaatggtcaggataaaggtgtcaccaaggagtttggaaagcccgcctctaggctccttgctctctacagcagcacgtgcaatcatagaaagacataaactctggaatcttctcaaaggctatgtatggaagccccaggctggcctgcccagcaacaattcccatatcttcccctagcccaaataaaatccaat

SEQ ID NO: 4331 - DNA, 201 bp, Mesocricetus auratus; identical to SEQ ID NO: 689

SEQ ID NO: 4332 - DNA, 178 bp, Mesocricetus auratus; identical to SEQ ID NO: 690

SEQ ID NO: 4333 - DNA, 382 bp, Cricetulus griseus
acctttgaggagccggttgctgtttggagcgagttagcggtgcggagatgtggttcgagattctccctggcctcgccgtcatgggtgtgtgcttggtcatccccggggtggccactgcgtacatccacaagtacaccaacgggggcaaggaaaaaagagttggtcgccttcgttaccagtggtatttgatggaaagagatagacgtgtctctggagtcaatcgctactatgtgtccaggggcttggagaacattgactagagaagcattttcctggcggatgaaaaaattacttggttattcatctgttcctgctagaaggcaaatgcagcatattatatactatgcgcatgttatgtaatgcttaataaaatttaaagaac

SEQ ID NO: 4334 - DNA, 297 bp, Cricetinae gen. sp.; identical to SEQ ID NO: 692

SEQ ID NO: 4335 - DNA, 398 bp, Mesocricetus auratus; identical to SEQ ID NO: 693
  misc_feature (347)..(361): n is a, c, g, or t

SEQ ID NO: 4336 - DNA, 389 bp, Mesocricetus auratus; identical to SEQ ID NO: 694
  misc_feature (278)..(278): n is a, c, g, or t

SEQ ID NO: 4337 - DNA, 489 bp, Mesocricetus auratus; identical to SEQ ID NO: 695

SEQ ID NO: 4338 - DNA, 273 bp, Mesocricetus auratus
  misc_feature (155)..(155): n is a, c, g, or t
  misc_feature (157)..(157): n is a, c, g, or t
tggcggtctggtgacttcgttgatgctggcttgtgcttgcgccgcatcctgtcgtgagacctgctgtcccgtgggcccctcggggttgcgctgcaccagggcagggaccctgaataccctccgcggcctgcggggcgccgggaacctgacggagntntatgtggaaaaccagcgggatttgcaacgcctggagtttgaggacctgcagggcctgggggagttgagaagcctaaccatcgtgaagagtggcttccgctttgtggcccctgatgc

SEQ ID NO: 4339 - DNA, 380 bp, Phodopus sungorus; identical to SEQ ID NO: 697

SEQ ID NO: 4340 - DNA, 384 bp, Phodopus sungorus; identical to SEQ ID NO: 698

SEQ ID NO: 4341 - DNA, 1400 bp, Mesocricetus auratus
  misc_feature (74)..(105): n is a, c, g, or t
cgaggctgatgagttaggtgaaactctccctgactctactcccctgggcctctacctgaggtcccctacctccnnnnnnnnnnnnnnnnnnnnnnnnnnnnnnnnctcccctcaaggggaggccaggaaggaaggctggggtcctgctgtcccggctgcccagggcctcagcaacccaccgggggaggaggagcgaggccatgactctgacctatcatctgaggagtttgaggacctggggactgaggcctctcttcttccaggacttcctaaggaggtggcagatcatctgggccaggtacccccagggccagagcctgaatgctgggatcagggtggggagtctgatgggttcgctgatgaggaagagagtggggaggagggagaggaagaagagcatgaggacgggactgagtcaggggctcaatggtgggggtcaggaccctccaaggtccaacatgtcacccaaagaggggacctccaggaacacgagtctgtgggtatcagtggtccctgggatgatggctggagaggtgctgcagctggtatctctgtgactggcctggaaactgagtctcaggacagtgctgagccttctgggtcagaggtatctgagtctgtctcctcagagggggaggatcaagcccctgaccatttggataccccccaaggggtgactaacgtggtcccaggggcaggagacaccttcggtatcagtggccaggcccccaacttggagtcagaacacatgaacgggaggttggagaatgggttagagcagtctgaggggcagggagtcctggacaggcaccaggatcaaggacacccttcgcagcaacaggaagtgggtgccttaaaggcccctttgttagggtctcctgtgcaccgaggcccaagccagtccctggagttccctttgagtggggcagatagagattcctggtcctcgggggaagactagacagtgctcctctgatgctgagggcttcatggtggggggatgtcctcccttgctcggggccagcaccctcagtttcgatagcttgacctgtggtgtctgtcctggagaggtgtggcgggctgagggagatgaggtcctgtcagggccatcttgcttggattgtcctgaaggctcaagctgagtcccggcactaggccccctttcttctgcatctccctgccaggagaggcctggctctgagctttcccctggggctgctctggccaggtcttgctaaccctgcctgtctacagtagagccatcctcaccatgtctggtctggcctatacccagaggagctgagggcagcaattgtgaccaccgacctatcatcttatctcagcctgctgagattttgttctgctcttccttgtttgaataaagttgtgtccctccctac

SEQ ID NO: 4342 - DNA, 578 bp, Cricetulus griseus
ctacagcgagcaggattcctactgggtggagaacctcatggtccagcagttggagaattcggaacctcccttcaagctatgtctccacaagcgggactttgttcctggcaagtggatcattgacaacatcatcgactctattgagaagagccacaaaaccctgtttgtgctttctgagaactttgtgcggagcgagtggtgcaagtatgagctggacttctcccacttcaggctctttgatgagaacaacgacgccggcatcctggttttgctggagcccattgagaagaaagccatcccccagcgcttctgcaagcttcgcaagataatgaacaccaagacctacctggaatggcccttggatgaaggccagcaggaagtgttttgggtaaatctgagaactgctataaagtcctaggttctccacccagttcctgtcatgtgctatgacatgaactgtaacaaagtttattctgacttaattatttaagtgccatagaattgtacccttgaagatttaagtataactaataattgtgagctttatcgtgaatgctgttataaaaatattttatatt

SEQ ID NO: 4343 - DNA, 772 bp, Cricetulus griseus; identical to SEQ ID NO: 701

SEQ ID NO: 4344 - DNA, 600 bp, Cricetulus griseus
taatgtgtgcctgtaatttcagcaaggctggtggttctctgagttgaggtcagcctcgtctagccaagttataatataaccagggctgtatacactattttaaaggctttgaggacttaaccatagaagatactgagttacttacttggtggctttcttaattctctttctaggataaggatgctaagttccgcctgattctgatagagagcagaattcaccggctggctcgttactataagactaagcgggtcctcccacccaattggaaatagtaagtataagccattttgttggggagaatcaaccagatggtaaataacatggtagtgggtgtagtaaaccacttcgtggcagatattttgcctttctgggtcctatgcttaagtgccatttcagctcatctctgtcatagtagtggcaaaagcttacaaacttttaaattctcagtttggtgatgcattgtatgcagttaggtatttagctgtttggggatagctccagtagcaaagaaagttgttgcagtagatatcaaaaactaatactaattccccagtttccttcagtgagtcatccacagcctctgctctggtggcataa

SEQ ID NO: 4345 - DNA, 1400 bp, Cricetulus griseus
ctccgttcgatcaggtccttttggccagatcttcagaccagacaactttgttttcggtgagttacatggaatgaattcctttgtacccaagggcatgattccagaggtgaaaggtgaagattagtaatgataatgacgtaatttttttcccttctcaccacattccaggtcagtctggggcaggcaacaactgggctaagggtcactacacggagggagctgagctggttgactctgtcctggacgtggtgcggaaggaggcagagagctgtgactgcctgcagggcttccagctgacccactcgctgggtggaggtaccggttctggtatgggcaccctgctcatcagcaagatccgagaagaatatcccgaccgaatcatgaataccttcagtgtggtaccctcacccaaagtgtctgacaccgtggtggagccctacaatgccaccctgtctgtccatcagctggtggagaacaccgacgagacctactgcatcgacaacgaggccctgtacgacatctgcttccgcactctcaagctcaccacgccgacctatggggacctcaaccacctcgtctcggccaccatgagcggggtcaccacctgcctccgcttcccaggccagctcaatgccgacctccgcaagttggcggtcaacatggtccccttcccacgtctccacttcttcatgcctggctttgcccctctcaccagccgtgggagccagcagtatcgggccctcactgtgcctgaactcacccagcaggtcttcgatgccaagaatatgatggcagcctgtgacccccgccacggccgatacctcaccgtggctgccgtcttccgtgggcggatgtccatgaaggaggtggacgagcagatgctgaacgtgcagaacaagaacagcagctactttgtagagtggatccccaacaacgtcaagaccgccgtctgcgacatcccaccacgcggcctcaagatggccgtcaccttcattggcaacagcacggccatccaggagctcttcaagcgcatctccgagcagttcacggccatgttccgccggaaggccttcctgcactggtacaccggcgagggcatggacgagatggagttcactgaagccgagagcaacatgaacgacctcgtctccgagtaccagcagtaccaggatgccaccgcggaagaggaagaggatttcggggaggaggcagaagaagaggcctaagccagagagagagagccctgcgtcttctcctcaggctacttagttccctcagctttcttcagctgcccgtttttctccttcagagttttcttttctgctgcctctgtcctgtttttttatttttttccatgggggggtaaacagtgcctggcacatagtaaggcgctcaataaa

SEQ ID NO: 4346 - DNA, 1255 bp, Cricetulus griseus; identical to SEQ ID NO: 704
  misc_feature (512)..(548): n is a, c, g, or t

SEQ ID NO: 4347 - DNA, 299 bp, Cricetulus griseus; identical to SEQ ID NO: 705

SEQ ID NO: 4348 - DNA, 1368 bp, Mesocricetus auratus
  misc_feature (1062)..(1077): n is a, c, g, or t
ctgacgcttaaagttctcagtctgcagaagtggatcctggagaagtacttagacaatgagacactggctgctgaggacaggtcattcttctcactacagctggcaagtcccgaaacgcacctggtacccagaacaccggggctgcaagccctgcaggtccagctcacgcaggtccgcaccagccaggagcaactgcttcagcaggtggacaacctcactcggaacccagagctgttccggattaagggtgaacgaggctccccaggtatcccaggtctccagggcccgccaggcatcaagggagaggcaggcctccagggacccatgggtgcaccaagggagccaggagcaactggtgccccaggacctcaaggagagaagggcagcaaaggtgacaagggtctcattggccccaagggggaacatggcacaaagggagacaaaggagacctaggccttccagggagcaaaggggacatgggcatgaagggagtcacaggggtcatggggccccctggagcacagggaaataaaggcgatcctgggaaaccaggcctaccaggtttggctgggtctcctggagtcaaaggtgatcaaggacaacctggattgcagggtgttccaggcactcctggtgcagcaggaccttcaggtgccaagggtgagccaggccaccctggtcctcctgggccaacaggaccccaagggatctccgggagtccaggagccgcaggtttgaaaggaagcaagggggacacaggaattcaaggacagaaaggcacaaaaggagaatcaggagtcccaggccttgcaggtagaaagggagacactggaaaccctgggctggcaggccccaaaggagaaccaggacgacccggcctgaagggagaccctggaatgaaagggtcttctggccagcaaggacaaaagggagagaagggtgagaaaggccaatccttcaaagaggtccggattgtgggtggcaccaatcgaggccgagctgaaattttctataacaacgcctgggggacaatttgtgatgacaactgggataataacgannnnnnnnnnnnnnnncgcatgctcggttactccagtggcaaaggattcacctttggtggtggctctgggaacatctggctggatgacgtgaactgtcaggggacagaggacagtttgtggaactgcaggaagaacaactggggctctcacaattgcaaccataacgaagacgcaggcgtggagtgccgctgacgtgggtgccgcagatgtcaccctgcgtccccaggtgtctttgggctccaccctcatggagatctgtgggctccatcactctgttgaggggagattaataaagccctgctgggg

SEQ ID NO: 4349 - DNA, 600 bp, Cricetulus griseus
cgatgtattcccagctgtttgggaggttgaggcaggattgcttaatgccagcctgggcagcataacaagacctgattctcacacacacacacacaaaaatacagcccagtggggtgacacacacctataacttcagcactggggcgcctaaaacaggacgaacaaaagttcaaggccatccttggctacacagtaagatttctgagagggagaggtggggggggggagaaaggtgtgggagagagggggagggaggggcaggccagtgcaggcttttaatcctagcacttgggaggcaggcacattctgagttcaaggacagcctggtttacagagagaattgcaggacagccaaggctacatagagaaatcctgtcttgaaaaaccaaaagaaattaaaccttctggtgtgtagatgccaatcctgttgttggtggctgccctctcccataatacttggcatccagagcaggtgtttttcctcagacccccactctgaccttggttcattagttggcttgccctctgaccttagattctttttcctttcttacagtactccccttccctaaataagcaattttggcagctggcaaaaac

SEQ ID NO: 4350 - DNA, 600 bp, Cricetulus griseus
ggctccagtgatttgctgtcagaagcaatccctgagtccctgaaaaacatgctcctggtgatggacacggccgagatcttccacagtgcagatgcgagaggaggcagcccctctgccctctgggagatcacctgggagcgcattgattgctttttgccacacttacgtgacgagctcttcaagcagactgtcatccaggaccccatgcccacggaacctcacagccaaaacgctctggcctccacccacctgacccctgctgctggtgaccccggccatctaccttccccagagataccctcagaagtgggggcctgtgactcagagaagcctgagggtacccgagccaccagcagcagctctccgggatcaccagtggcctccagccccagtagactgagtccttccccagagggacctcccccattggcccagcccccactaatcctgcagcccctgacttccccgctgcaggtgggcgtgccacccatggctctgcccattatcctcaaccctgcactcatcgaggccacctctccggtgcctctcttgtccactccccgtcctacagaccctattcccacctctgaagtcaactaa

SEQ ID NO: 4351 - DNA, 600 bp, Cricetulus griseus
gaaaagcatgttttcgctaaaacatgtgagaagaatgttgaaaatactagaattggtcgtgtgttattaaaaaaagtagtcaccacaagtgtaaaaatttctgttttttgacctttatatatgtgtccgaaaatagatacttctgcccggatgatctccagtggtctggggtgcaggcttcaaacctgtagctgtttagcgacagagtggttcaattccacctttcgggcgggagtatctatcccattttgcttcctgcaaccggtactatgtgacaaactcctctaaatccccctctattcgtatttattcctcttcgtcattacttttttccggtcccggaaggatccaacacatctcagaagtgtatttaaatttgtcttctacagttctagcgtattcctgtctgtctctgatgtctctccttcaacgatttatttattattcatccagtcatttgctcgattatgtatttaatcatgcgtgcagctcttagtcatatatttgttcatttgttcactctggctcagtcctgtctctctatttgagctgtatggatggggacacagttgtgatcacacccttagccctggtctcatg

SEQ ID NO: 4352 - DNA, 600 bp, Cricetulus griseus
  misc_feature (285)..(297): n is a, c, g, or t
  misc_feature (299)..(331): n is a, c, g, or t
  misc_feature (399)..(421): n is a, c, g, or t
  misc_feature (427)..(458): n is a, c, g, or t
ggacctgggttcaactctcggtacccacatggcagctcacaactgtctgtaactctagttgcaggggatcttgttaccttcaccccaatgcatataaaataaaggtcaaataaattatattaagaaaattaaaaggttaagtgcagggtttggtgcctggtgcttagaaagtgctgagtattcttaagtaggattctgtatacagtttatagttcttgagatttgtaaaaaaaatttttggcccagatgatttccagtggtctggggtgcaggcttcaaaagctnnnnnnnnnnnnngnnnnnnnnnnnnnnnnnnnnnnnnnnnnnnnnnacaggcggatctctgtgagtttgaggccagcctggtctccagagcgagtgccaggataggctccaaannnnnnnnnnnnnnnnnnnnnnngggggnnnnnnnnnnnnnnnnnnnnnnnnnnnnnnnngttggagagatagaaggcttggtggttaagagtctcactgctcctccagagaacctgagtttgattcatgacctcatgacagacagctcacaaccacctgtaactctagcttcaggaatctaattccttctggcctctgcag

SEQ ID NO: 4353 - DNA, 600 bp, Cricetulus griseus
  misc_feature (66)..(116): n is a, c, g, or t
  misc_feature (257)..(310): n is a, c, g, or t
tcggacgggagtatctatcccattttagccgggagttggtagcacacgcctttaatgccagcactnnnnnnnnnnnnnnnnnnnnnnnnnnnnnnnnnnnnnnnnnnnnnnnnnnncagagccagtgccaggataggctccaaagctacatagagaaaccctatctcgaaaaaccaaaaacaacaacaaaaaagattcctagaaatttcaaaaaaagtgtttggatctgatgaacaaaattcagcaaagtggcagtnnnnnnnnnnnnnnnnnnnnnnnnnnnnnnnnnnnnnnnnnnnnnnnnnnnnnncaatacaaaaaacatatgtaacagcaatggttgatctaaaattgaaattaatgaaacacttccattcatcatagcatctgtgactaagataaaaatgaatgcagtgaagaatgtacaatatttgtacattgaaaactacaaaacatagttgcaagtgactaagaaacaaggaagaaaacataatattttatggaatataagggtcaatactgttaaatattatcagctatctaaatatttagtgcaatcactgtcaaaattcccataagttttatctaagaaatggatga

SEQ ID NO: 4354 - DNA, 480 bp, Cricetulus griseus
catcttgcccaaaaacaactaactggaggaaaggtttacttgggttatagttccaggctacagtggaccatttcaggaagtcaaggctggaacaagtcacatcccatgcatagctaagaagagagcagggaaagcacccatgcttcccacctgctgctacttagccatctttctcctctcctatacagttcaggacccctgcccagggaatggtgtcacccacaatgggctaggtcttcctacagcaattaatgattgagacaatccctcccacacaccagacatactggccaactgaataaagacaactactcaattaaaactcttctgttgggctcagatgatcctcagtggtctggggtgcaagcttcaaacctgtagctgtttagtgacagagtggttcaattccacctttcaggcatgagtatctatcccattttgcttcgtaaaaccagtatttcctggctttggtggtgcaca

SEQ ID NO: 4355 - DNA, 302 bp, Mesocricetus auratus; identical to SEQ ID NO: 713

SEQ ID NO: 4356 - DNA, 218 bp, Mesocricetus auratus; identical to SEQ ID NO: 714

SEQ ID NO: 4357 - DNA, 574 bp, Mesocricetus auratus
ccacggcacggtacacccccacctggctgcagctgcccaccttcccacccagcctcacctctacacctacacagcgcccacagccctaggctccacaggcaccgtagcccacctggtggcatcccaaggctcagcacgccacaccgtgcagcacactgcctacccggccagcatcgtccaccaagtccctgtgagcatggggccccgggtcctaccctcgcccaccatccaccccagtcagtaccccgcccagtttgcccatcagacgtacatcagcgcctcgccagcctccaccgtctacactggatacccactgagtcctgccaaggtcaaccaatacccttacatataaacactggaggggccgcagggagcggggtggaggagcccccagcagacctggggagccgggtttctctactgcaggtgcctgccgcactcaaacaatgcaaatggggcagggagggacagctgggacacagatgaaacttgaactagaagtgggaggacttagagcagagaagagagcattttagaaggaagggattcaggagtgggaaatctatgcttttta

SEQ ID NO: 4358 - DNA, 600 bp, Mesocricetus auratus
tggtccccaccctttggtggtggatgttaagggaacctttttgggagctgagcttatggtaggaccacaataaagctttaagaacccgtacagtagaattccgaccctaatcatgaagctttactggaaagaactaggactgccactacccactgtctgcaccgaactcagacagcagcggccggctctggagcagggtgagccttgggttcctccgccttcagaaccttcaataaatcaaagacaggtgtctttgcttgctaccccgccccagtctacaccacgtggggcccgagctccgagcgaaaggggggccgagaaactctctgtggagggaacctttgcgaccacacctctctcggttattcttaaattccccgcaaccactgaaccgtaggaccaccgacagaaaagcgccgtttgtgcaaccccgcctcttccgctacaagcttggttcgcttcgatcccgccccttcctccgtgccgaccccgccttttcccgccgcggactctcaatgtccggggtcctgacgcttttctgagccgccctacatcgaagttcccgcacgtgggaggcccggccggatcttgagcgcgatg

SEQ ID NO: 4359 - DNA, 1370 bp, Mesocricetus auratus
acaccagctgcctgctcactgcctgtttccctggtgtggcttactgctggacactcagactctggaggtgctctgtgactacactggttatgcccggacctcaattaaggccagcctcaccttccagcgcaccttcaaggcggggaggaacatgcgacagaagctcttagctgttttgcggttgaagtgtcacagtctgtttctagacttgcagatgaatagccttcagacagtctgtatcaatgtgtacaagatcttcctgcttcaggcctacaggttccatgcgtgtgcgcttcagcttccctttgaccaacatgttagaaagaaccccgcattctttctgagcatcatctccaacatagcatcctgctgctactccatcctgaaggtcaagaatgcaggaatgacactaaaggccaagggtgcctctggctcatttcctcctgaagctgcacgttggctctgctaccaagccttcctgctcaagctggctggtcattctgtcacctacaagtgtctcctgggacctctcaggacagcacaaaaacagctgtgccggaagctcccaagggcaacaatggccatccttgagactgccgctgacccagccctaagcacagactttcagaccattttggactaacccctccccttcagctggatgaacatgggcattgtagcctcaccactcctggatgcatgccacaagagggactgacctgttgtgaggccagtttgccctccaaaacatgtgccagggctgtagtatgggggttgtccctgtgccgtgtttcctgtggtggacttgatttctttcctgatgcctccggggaagcagctcccacccctctcggtggcagggatccactagccagtaacaccagacagaggagaagatgcctgggcactgggacagtgtgcacggatctgagatgcccggccctgtgtctcttcacatctaacccatggagcctttcccaacggggtcacagtagaaagtgtttttggggggcttacagttttaaaggtttagaatctatgatcatcacggtagggagcatggcagcaaggaggcaggcatgtgtcttctcacgcctaaccgaggagccttttccaatgggccagtggggtcagaatgtctcagagatgaaaacaggactttgaactgatgtgggggtttgaagatgtgtagtccccacagacccgtgtgttcaaatgcttggcctattggaatgtcactattaggaggtgtggcttgttggaggaagtgtgtctgtcactgtgaggacagggctttcaggtctcatatatgctcaaactgtgcccaatacacagacgacttctgctgctatgaataaagatgtagaact

SEQ ID NO: 4360 - DNA, 1381 bp, Cricetulus griseus
atcttactaataatccctttgcctgtatatgtgaacatcagaacttcctgcagtgggtcaaggaccagaggttgttcttagtgaagactgaacaaatgacatgtgcaacacctgtagagatgaaggactccctggtgctggactttaggaatgccacctgttatgtgcagaagaccatcatcagtgtgtcggtgatcagtgtgcttgtggtatccactatagcatttctggtctacaaattctatttccatctgatacttattgctggatgtaaaaagtacagcagaggagaaagcatctatgatgcctttgtcatctactccagccaggatgaggactgggtgagaaatgagttggtaaagaatttagaagaaggagtgcccccctttcagctgtgcctccactacagagactttattcctggtgtggccatcgctgccaacatcatccaggaaggcttccacaagagccggaaggttattgttgtggtgtctagacactttattcagagtcgctggtgtatctttgaatatgagattgctcagacatggcagtttctgagcagccactctggcattatcttcattgtcctggagaaggtggagaagtccctgctgaagcaacaagtggagctgtatcgacttctcagcaggaacacctacctagagtgggaggacaatgctctggggaggcacatcttctggagaaggctcaaaaaagctctgttggatggaagagcctggaatccagagggagcaacagaggcagaaaacaatcaacaagaaacaacaacttccatctgaggaggacaaaacatcttggtctaatactcattctgtttacaagtattaaatattacagctcaccatggattatgttgtagacaagggtcccatggtgcacaaggtaccaaaaggctggtaaactaatggaccttacaaagcagaaagtgataatattatgctgaaactccatgccttccaggggtgctctttcaccaactcaggcaaagaatcataaccaagaaagtcagctcctactgtatcaagctgaaggaaaagaggctaagccccagtgagaccaaaaaggagcattagttatcccttggccttttgagtctatataatatatcatgtactatgtttcaactaccaactgaactgaatgtttatttactttcccttcttactacttaatgcaatttaaattccactggctctctttgtgtgtttgattccaagttcatgttccattatatgtcattttcttttttacctatttctttaggaaacctgattaatacatgctcatggacatcctggccaatacttagtatgctgtatttattaaataaaaattcctaatatacttttatttttat

SEQ ID NO: 4361 - DNA, 1400 bp, Cricetulus griseus
agtgctgttaatgggtttagccccttggacagaggaggtgggatggcctctcattgggctgggtaaaatgagcagtactcaccagagctcttgccctcggtgccagcccttcattgacagccagcatgtcatccacaaatacttcctgcctcgtgcctacgctgtcctcatcccgctggccacgggcctcctgctgctcctatttgtgggtaagtctcccattctccaaaagtctcctgactggggggcaagatgtctggaaggccagccactctcaccccaagtgtgcgtccatactttggcacttggtgttcatctgcctagaagctccttggccccaactctccctggggttttcctgttcctccttaaaggctacaagcagaaagccctctgcttgttccagtgcttcaggtttgtggggcagtaagggatgtctgtctcccttttcctgtctcagcttcatcttcacacctccgccacctacccttttgtcaccctgtcacctctcttattgcttctgtgggttggggactgtgtcttcatcattacagcattctaagctctagcgcaggagtgacgctgaacgagtgctaggagcgttcgggtgactggacgatgggacggtgctggtaggaaggagggtggatatgtgaggacatggatgggcagatcactcaccatgaaatctgaagcactcagcaaagcatgtgacagatgatgagtggccatggggcttaaggaatgactgtgaaggtgcctacagggtgtttgtttgggagccctggccatccagccttcattctggtccttttgctctgtgtgttctaggattgtttatcacctatgtgatgctgaagagccgaagactgaccaagaaggctcagtgagggtccagcagggatgaggataccagccttctccatatctcctccagggaagggaccaagtgtcacatcctgatacagtcagcctgactgctgcagtcctctttaggaggtggggctgcttacagctcaactctgacaaactggagccctctcctctcttattcatccttctggaagccaagaggaacgtgggttgggaaacctctccctcatggcttcgggctcagggcctgaacattgctggtcctgtccacctacagtcaaagctctctgccactcccacaaggttctgctctcttgcctgtttttcctcctgtcatgtgctgatagatgctgcaggctccccgtttgtgtgcagcctcccctcgccgtacaacctatctcttcacatggcagctcttttgagtctgacactgtccagactccatgaggacttctgcacccagaaagccctagtcccagctggcctgtgtttgggaaaacttacaaataaatgttgatcatgttggt

SEQ ID NO: 4362 - DNA, 447 bp, Mesocricetus auratus; identical to SEQ ID NO: 720

SEQ ID NO: 4363 - DNA, 464 bp, Cricetulus griseus; identical to SEQ ID NO: 721

SEQ ID NO: 4364 - DNA, 600 bp, Cricetulus griseus
agctgtgagaggggccgggagcagagcctgcaatgccgctatcccggagaacagtgtgttgaggtggtcaccctacggagcacggaaaggagtctgaaggatgagaactacaccagaggctgtggcagtcttcccgggtgcccgggcatagccggtttccatggcaaccacaccttccacttcctgagatgctgcaactccacccactgcaatggcggcccagttctaaatcttcgggacttaccaccgaatggcgtccagtgttacagctgcgagggcaacagcacccacgggtgttcctccaaagagacttccctcgttgactgccggggaccgatggatcagtgcctggaggccaccggcttggatgtgctggcaaaccggagtcacaccgtgagaggctgctcgacggcttcctggtgcccaggctcccatgtggcagatgccttcctcctgagccaccccaacatctcgtgctgtgatggcagcggctgtaatggacccagaagcggcgcccccaggacagaccctgctcgtctaggcctcatcgtctccctgctcctgaccgtcagactgtggggaggcactctcctctggacc

SEQ ID NO: 4365 - DNA, 827 bp, Mesocricetus auratus
gattaccacataagctgcagaggaaggagtccagagacagagcaagatgagctccgagacaggtcctgtcgttgttgaccccactctgaggagaagaattgaaccccacgagtttgatgccttcttcgaccagggggaacttcggaaagagacctgcctgctctatgagatcagatggggcggcaggcacaacatctggaggcacacgggccagaacaccagcagacacgtggagatcaacttcatagaaaagttcacttcagagagatacttttacccatctacccggtgctccatcgtctggttcctgtcctggagtccctgtggggaatgctccaaggccatcacagaatttttgagtggacaccccaacgtgactctgtttatttatgcagcacgactttatcaccacacggatcagcgaaaccggcaaggactcagggacctcatcagcagaggtgtgaccatccggatcatgactgagcaagagtactgttactgctggaggaattttgtcaactacccaccttcaaatgaagtttactggccaaggtacccaaatctgtggatgaggctgtatgcgctggaactgtactgcatccatctaggacttccgccctgtttaaagataaaaagaagacaccaatacccacttacgtttttcagacttaatcttcagagttgccattaccaaaggataccgccccacatcctttgggctacagggtttatatgacctctgggagttggagatgaataaaatgactcccttgtatgtgtactgtttggacagcaagcaatggtgacctattaaaaagtatcaagct

SEQ ID NO: 4366 - DNA, 600 bp, Cricetulus griseus
aaaaacacttaaagcattaaaaaaataagactgaccaaataaaaacttgataggatctctaggtcctacttaaatagccattccatcccatctagatccacggagaactgtgtgataggctatgaccgaaattaaagcgggatgctttacattaagatatgcaagtttatgtagagaaaacaaatactatagactctataatgttcttccacctaactagtatttaattatgtggatttcttttatactacaaaagattgtttgagtttgtctttttgatactgatgcaattgtttggctgttcttacattctgtctgctgctgcctgttgtctcacattttgacccattgtgttaagaacctattgtgctcctttgtaatcaaaaaattgggggggatgctaattgaatatttgaaaaataagtataaagtgtttgttactcaaaattttatacatttgtaaattctaattacatatgtgaatggtaatagtctcagtgaattgattattggttgcaaatgcccctggcagtaatattggatgaaactttctttaaggcagaagacattaccttaatataaaatagatgtaaactaaaa

SEQ ID NO: 4367 - DNA, 562 bp, Mesocricetus auratus; identical to SEQ ID NO: 725
  misc_feature (422)..(454): n is a, c, g, or t

SEQ ID NO: 4368 - DNA, 600 bp, Cricetulus griseus
ctgaatgctgtgtccttagtcaacctggtgatgagctgtggcatttctgtggagttctgcagccatataacaagagcattcaccatgagtaccaaaggaagccgagtaagccgagcagaagaggcgctggcccacatgggtagttctgtattcagcggaatcacacttacaaaatttggagggattgtggtgttggcctttgctaaatctcaaatttttgagatattttactttaggatgtacttagccattgtcttactcggagccactcacggactgatatttcttcctgtcttactcagctacgtaggaccatcggtaaataaagctaaaagacacaccactcaagagcgatacaaagggaccgagcgagaacggctcctcaatttttagccttgtagcaggctttggtgactttgtctatggagaggtcaagtttctgcaggaaagctgtactgtcaaggccatgctggattctggttgttcctaggcattaggctgtgtcacagctgtggcaaatgcagctccacccacgtttttaaactcaggaatgcacctgtgacttgtgaagcagtattatggaaactgaaggtgacagaa

SEQ ID NO: 4369 - DNA, 249 bp, Mesocricetus auratus; identical to SEQ ID NO: 727

SEQ ID NO: 4370 - DNA, 1400 bp, Cricetulus griseus
  misc_feature (435)..(451): n is a, c, g, or t
ctgtgaggacaaaatgcaatatttagaaataggatctttaggctgggagggagaaaagaggaaaaaaatgaaagtataacatttttcataagtataagatttcataaaaaaatgaaatctataacatagagggtgttgataaagtaagcatggatatgtttagtaaagccgacagagctaagaattagctttgtgagtaattggacttaatcaaacttttcaaggtgggatacaaatgaataattgtagaataaatggataaaagaatatgaataaaatgaatagtgagtaaaaattaaaaatgaagctttttacttaagtgcatattgtagtggctagaacaaatagattcaaaatagaaatcatttatatattcttgattagaagataaaatgttattttagaaatagccatctttggaagtaaatttgctannnnnnnnnnnnnnnnnttcataatttgtctcttattttttttcaggaagaaaaaaaaacttgacttatttgtactgctaagttttattcaatgtgcttgcttgcttaaatttttaatgaagttttagtcatttggtggtcaaattccttttatctactaatcgcttttcgtggctttggcttttaaaattgtatttactgcatttatttgtgtgtattaggagtcaggtggccatatgtgccatggcatgtgtatggaagcacttgtggacatgaatcttctctttccacatgtgtgggccactggaatcaaactagtgtcaggcttggcagcaatttttaatgcactgagccttctcaccaccccctggacttttgtggggcagaaggggacaagtttaatattttatttactccatgtagaaagcctttaaaaaatgtagaaagcctttaaactacctattgttttatttgaattatgaagctcttgtgtttatataaattacagttaggtactgtggagactaatggtagctacaatagtaatattaatagctaaaacttagtagaatctgattgagttaatttggccctttccatcataaggtactcttcccaagcatcacatgacctgtgcttaagtctggtgggggcttatggctttgatattgaaaacaaatcgtcaaggatgttaatttcttgttactgctattacactgaattttctatggctctttaggagaggaagagacaagtcttcttttggcaggtgttactaagtaggccatttcccaaggaacagggaatttgccaggcttttgtggtggagagaatagaatgaataaatgctgtggggagtaaagagcttgtcagaagatgattagttctgtggcaccaaaaccaagagatcagttttcctgtgagaagtaaaggaagcattgtagaaaaatagatgtgttgaagtct

SEQ ID NO: 4371 - DNA, 396 bp, Mesocricetus auratus; identical to SEQ ID NO: 729
  misc_feature (263)..(279): n is a, c, g, or t

SEQ ID NO: 4372 - DNA, 555 bp, Mesocricetus auratus; identical to SEQ ID NO: 730

SEQ ID NO: 4373 - DNA, 540 bp, Mesocricetus auratus; identical to SEQ ID NO: 731

SEQ ID NO: 4374 - DNA, 600 bp, Cricetulus griseus
  misc_feature (373)..(390): n is a, c, g, or t
ccacaagaagcggcttccccttgcagaccaagccacccacatgattcgaacattaggctgcagggggctaaggactgcagcagctcctgcagtctggccgcccccatggagagtgatgccattcaccagcgcaagctccggaagctccggcagaaacagctgcagcagcagttccggcagcagatggaggcccacctacagggccacacacctgccgtaaaagtgaaagccgagcgtgaggcagtgcttccagaccttcctccaaaacacagtacccctgtaactgctgcctcagaactcctcagggagaaagccatttttccagataaccctgaagacaaccttgaaatgtgggacctgactccggatttannnnnnnnnnnnnnnnnnttgtctagaccagaaccacctcaaacctctgccaccagagtccaggtgatccaggatggtgtcctacacggcctttgccaccagatgccaccagaaaaacatgaagctggtcacctgcaggcccacagcactcaccagcatgtattaggaaactctgactctcataggaagagccaggacctgaagaaaaggaaaggtgatccatcctga

SEQ ID NO: 4375 - DNA, 600 bp, Cricetulus griseus
ttcctctaccccagaagccatcccactgaccagccgccaggcctgagccccccgctggcccgcaagcggggcctggttgcctgggttgtgagccactgggatgagcgccaggcgcgggtccgttactaccgccagttgatccagcatgtgcctgtggacgtgtttggtcgggcggcagtcgggaaaccagtgccagccagcgggttgctacacactgtggcccgctacaagttttacctggccttcgagaactcacaacacgtggattacatcactgagaagctgtggcggaatgccttcctggctggggctgtgccagtggtgctaggtcctgaccgtgccaactatgagcgcttcgtgcctcgtggatccttcatccacgtggatgacttccctagtgctgcctccctggctgcctacctgctctttctcgacagaaacctggctgtctatcgccgctacttccactggcgccggagctatgcggtacacattacctctttctgggatgagccatggtgccggacatgccaagctgtgcagacctctggggaccagcccaagagcatccaaaacttggcaagctggttcgagcgctga

SEQ ID NO: 4376 - DNA, 600 bp, Cricetulus griseus; identical to SEQ ID NO: 734

SEQ ID NO: 4377 - DNA, 476 bp, Cricetulus griseus; identical to SEQ ID NO: 735

SEQ ID NO: 4378 - DNA, 600 bp, Cricetulus griseus
  misc_feature (400)..(416): n is a, c, g, or t
tctgtgggtaatttagagaaatggttttggaattaatgtttccctcattttcaaatttaaggaaatgtattaacatgacatcatataagttgtaaggataagaagagaaacaccttgctttcaaatcacagtttattttaattgccctcccttgagtaacatgtatattttgatggaaaatttttaagagctcagaattagcaatcacttcatttggattaaattatcctgtatatacgtgataatgagcactgaaaataatttattctccactctcatttgtaaacattcttttttcacatcttatagttgtctgtaaagtaagtttatgattcaattgtttctacatcaatcagatctttagtctgtttgggaaatggaaatgggtgtcctaaaatannnnnnnnnnnnnnnnngtattataatgtctagattctagtttgcataatggtaacaaagaagtattagagtatcacttaattcttaacctctttgagttcagagttgacactgtgtgtaattgatgtactttttaactgtttaccacatttgtgaagacagactgactcatgttgtaaataagaaagatatgaagcagaa

SEQ ID NO: 4379 - DNA, 448 bp, Cricetulus griseus; identical to SEQ ID NO: 737

SEQ ID NO: 4380 - DNA, 600 bp, Mesocricetus auratus
gccgccaccaagcgtcagaagtacgagcggatcagtgagaagaagatgtcaacgcccattgaggtcctctgcaaaggctacccctccgagttctcaacatacctcaacttctgccgctccctgcggttcgatgacaagcccgactactcctacctgcgccagctcttccgcaacctctttcaccggcagggtttctcctacgactacgtcttcgactggaacatgctcaaattcggtgcagcccggaatcccgaggacgtagaccgggagcgacgagaacacgaacgggaagagaggatggggcagttgcgggggtccgcgaccagagccctgccccctggcccacccacaggggctactgccaatcgactccgcagtgcagccgagcctgtggcttccacgcctgcctctcgaatccagcaagctggcaatacttctcccagagcgatctcacgggccgaccgggagaggaaggtgagcatgcgactccacagaggcgcacctgccaacgtctcctcctcagacctcactgggcggcaagaggtctcccggatttcagcctcacagacaagcgtgccatttgaccatctcgggaaatga

SEQ ID NO: 4381 - DNA, 600 bp, Mesocricetus auratus
gtgtgaggcaggtgcaggctaaccaggaatattatcagcagtggagtctggaggagggtgagccttgtgccatggacatgtctacttacaccctggaggaactggagcatatcacatctgaatacactcttcgaaaccaggataccttctctgtggccgtgtccttcttgacaggccggattgtctatatttcggagcaggcaggtgtcctccttcgttgcaagcgggatgtgtttcggggtgcccgcttctcagagctcctagctccccaggatgtgggtgtcttctatggctctactacaccatctcgactgccaacctggggcactgggacctctgcaggttcaggcctcaaggacttcacccaggaaaagtctgtcttctgcagaatcagaggaggtcctgaccgggatccagggcctcggtaccagccattccgcctaactccatatgtgaccaagattcgggtatcagatggagctcctgcacagccatgctgcctactcattgcaaagcgcatccactctggttatgaagctccccgcatccctcctgacaagaggatctttaccacgcggcacacacctagctgcctcttcc

SEQ ID NO: 4382 - DNA, 1400 bp, Cricetulus griseus
ctaacccagccaggcatggtgggggctggggcagcacaagcctgacgatggctatggaggctctccaggccttcctctttccctccccctctcgcctctgcagctcttggggtgaagcgctgttcctgacactacagacaattaccatctgcttcctggtcctgcactacagaggagacactgtgaaaggtgcggggatgtgctggagagcgggcactgggtcttgggaaccttgctggggactcaggaggctcaagagggctccttgtctccctgacccccaggagttgctttacttgcctgctatgcgacactcctgctggctctgctttctccactcacgcctctggctgtagtcaccatgctccaggcctccaatgtacctgctgtggtggtgggcaaggtgggtactcggaagtgaaacgaggtgtgtgtggtggcggcgggatggaaccccaaagtatgcagtattggttttcgagaatgagggattagtgatgggaacacaggggaggttcagatgacagaaccaaacaaaagtgtggatttctcctctagttgctccaggcagccaccaactaccacaacgggcacacaggccagctttcagctatcacagtgtttatgctgtttgggggctccttggccagaatcttcacttctgttcaggtagtgcacctctgcttctagagggcacttaaacctcatactcccagtggaacctttctagactggtggctctccttaacaggaaactggagaccccctcatggctggagtctttgtggtctcttccctctgcaatggcctcattgccgcccaggtcctcttctactggaatgcaaagcctccccacaaacataaaaaggagcaatagtgctgagctagcttctagaatcattcattccacttccattcagccactcaacttgagggtcttccccacttgacgtggtctgctggtgcaactcagtcgtcctccattcctgcataactgcaacctcctgagccagggtttgtgtaaagagtaaaaagcttttccaagtcctgtattcactcgtttcaccaatggctgaggtccctcctttataagcagctattttgttattggagcagacgccttgccttgtccacttaccttctttcaggatggaggacagagcctggacaaatgtggttgggagcttgtggctgcgtccctctgccagctggttgggacagtctattggaccctagttctgaaggtgggggaggggagaatgactcaggtaaaggcctcagggtggagtagggaggttcctgctgtggcaggtccacgaagggtgtggagaaggcacaggttgctgttgtagtgggaatacagatgggacaataaagactcggagacgtgctttcattgt

SEQ ID NO: 4383 - DNA, 600 bp, Cricetulus griseus
gaggattgtggggtaccctgcacgcagccatttctgggataactctaaggagcggtggggatacacctccaagtggacaaacgactactccatggtgttgacaggagctgctatctaccacaaatattatcactacctgtacacccattacctgccagccagcctgaagaacatggtagaccaactggccaattgtgaggacattctcatgaatttcctggtgtctgctgtgacaaaattgcctccaatcaaagtgacccagaagaaacagtataaggagacaatgatgggacagacttcccgtgcttcccgctgggctgaccctgaccactttgcccagcgacagagctgtatgaacacgtttgccagctggtttggctacatgccgctgatccactctcagatgaggctagatcccgtcctctttaaggaccaggtctccattctgaggaagaaatacagagacattgaacggctttgagggatcccactgagtgggggaggggaagaagataggactggagtccagctgctctctcttcccggtgcagagccactcagctcatcgatggagccagactgtgccaagtatcaaaaatt

SEQ ID NO: 4384 - DNA, 1400 bp, Cricetulus griseus
cctccaagacaccaaagaaaactactcatcatccaactcctcagattcggggtagaaatatcgctgtccaggagccaacaagtgtgcttgaagaggcccggctgatgctgcatgtttctgctgtgcctgactctcttccctgtcgagagcaggaattccaagacatctatagctttgtggaaagcaaacttcttgatgggactggagggtgtatgtacatttctggggttcctgggacagggaagacggccactgtaaacgaggtcatacgctgtctgcagcaggcagcccaaacaaatgatgttcctccctttgaatatgttgatgtcaatggcatgaagctgacagagccccaccaagtctatgtgcagattttacagaagctgacgggccagaaggcaacagctaatcatgcagcacaactactggcaaagcgattctgcagccaagggtcccaacaggagaccactgtgctgcttgtggatgagcttgaccttctttggacttccaaacaagatgtcatgtacaacctctttgattggcctactcacaaaggagcccggctgatagtcctggccattgccaacaccatggacctgccagagaggatcatgatgaaccgtgtatctagtcggctgggtctaaccaggatgtccttccagccctattctcacaaccagctgaaagagatcctagtgtcccgactcaagcatttaaaggcctttgaagatgatgccatccaattggtagccagaaaggtagcagccctctctggagatgcacggcgctgcctggacatctgcaggcgtgccaccgagatttgcgagctttcccataatcatggcaactctctgggcccagtgactgtgtcccacttaatggaggctatagatgaaatgttctcctcatcctacatcactgccatcaaaaactgttccctcctggaacagggcttcctgagagccattattgcagaattccgtcgatctggactagaggaagcaacatttcaacagatatacagtcaacatgtggctctgtgcaggatggagggactgccttaccctaccatgtcggagaccatggctgtgtgctcaaatctgggttcttgtcgcctcctcctggtggagcccagcaggaatgacctactacttagagtaaggctcaatgtgagccaggatgatgtgctctatgctctgaaagaagagtgaagagcttcacagacttctgctgtttctcagcctatttatttttcttcagaacatgaataatagcaaaatatacagaatggaaatgattgttgtagattttggcatttatgttatttagtttgctttttccagagtgtttgagaaatttgtggtaatgtactatgtatataaataaataaaaataaatat

SEQ ID NO: 4385 - DNA, 1400 bp, Cricetulus griseus
tacatacagtccttatactgaagaaacatcctatgagaattcccttctggttaaacagtctggatctctcccgcttagttccctgattcatgtcttacgaagccttacccccaatgcaagggggattttcaggctacttataaaattccagctggataaccaggacagcccttcctacattggactttcttttcaagatttttaccagcagtgtcgggaggcattccttgttaatagtgatctcacacttcgagcccagctaactgaatttagggatcacaaactcataaaaacaaagaagggaactgatggtgtagaatatttattaattcctgttgacagcggaacattggctgatttcttggagaaggaagaggaggaggcttagactgtcactttttaggtggaagagtcattgttccccagctgccgatccttagtaagaatgctcttttacatccaacattagatcattctgtccagcatacaagttttaccattgaaggggcatgtcatcaatttgaacttggattagcctggctggtgtactgtctctgtggtcattgagctgggggaaaaaatgtgcctttaatttattacctctctgaggacttcttgctggatgaagagtgtgctcagggcttatttggaaccggatgtttggggattattttacactgaatgcaatccctgattgttgagggcagtttagcactacccaggctgaattactgcaggtgcacttgttcacatcttgaaagtacaaagaaagatggggcacacagaacttatgaggaaggaggcggtttatttgctttttctgaaatgataaaaggtatttagtgggttaagatggtcctgctttctccttgtggacttaggctgcacataattgggacagttagtgctattccaccaaaatagtgggagaagtataaggactagataaggcatgtgcccaatctagaacgcatatttaaaatagttaatatctgtaccatgatcttgatttttatgatagaaatgagaagccaggctaaaaaataaaatcccgatttacatgttagtaattgttttcatgacaatagataaaaaaagcatttcattattcttgtacatgaacattttttattttcataaaaaacacataagtatagatggcacacccctttagtctcaccattctggagtcagaggtaggcagattgcttctcaatcctttcaaaacaacggtagcaagacaggagctcacatttgtaatcccaacaccaagaaggctgaggcaggatgaaacatgagatcaaggcctggactagttaaggagttctaggtcagtctgaactacaatgatgccctgtttcagaaaacaacaaactaaataaatacacagtgataacatg

SEQ ID NO: 4386 - DNA, 432 bp, Mesocricetus auratus; identical to SEQ ID NO: 744

SEQ ID NO: 4387 - DNA, 1378 bp, Cricetulus griseus
  misc_feature (344)..(366): n is a, c, g, or t
gcggctctggctccaccaccggttcacgcactggttcacgcaccggctcccgggccggctcccgccgtggcagctttgatgccactggctctggcttctccatgaccttctcgtcttcctcttactcttcctccgggtatggccgccgctacgcctcagggcctccagcctctttagggggtcctgagtccgcggtggcctgacccctctgcctgcaccctgccctcccgctctgcatgcggccaggctccctgtggaggcgctggggtcttttaacatgtaaaggtgtcttcctcccaagcggtgcctaaaatttaaccaaaaagaccagactaacacgttannnnnnnnnnnnnnnnnnnnnnnccagacagcctgtgtcttgggaaatggggctggcccaggcccagtgaccacttcaccactcccttgggtccccctaaccctaccacctgccactcaccactgctaggtgccttggagaatccagagctgggcactcagcctaccacgcctctctctcctgggaggattctatctgggaaaggcctccagacctctaagccaaccccgccggatgtctgcctgctggccctagctgctgaggggacctggggaacgatcctatgagcagacagctcttgggcctcttgaggcctctgtcctgagccagctgcgtctctccagtgtgtcgctgaattacctgcctattcatttgggtcttgctggcaaaggaaaggccccaagccagccatctcttccagcctgcccggagaggccccttccccgtgggaagatgaggcccggccctggccccagcctcccgcctggctcctgcagctgccattggagctatgcttttgtagctcaccggcccgtactcaccccccgcccgagacccgagcctctgcttcagcctccagcctcagctccccttgtaagtgccttctgtgtccctcttgtgccctaaagacccagacgcaggggtaggagatggactttgtggctgggcaagggcttggacggttcttcagatctgagacttcttctacccagaggccagtggctgctagcctgtggaaaccccctctgggtgctgctgcccacctctcttccagggagccttggcctctccgtggcccaaagacactggctggcccatctgtgcagacatcagcacccggccagtaccacctcccttcctgtccagccagcccctggccttggtggctcctacccctgcctccaccctctgagtgagctctgcatgttccactaacctcgagctggtggcaggtggagatgccaggcagaacactaacctgaccatgggcggagccccgcggtggccgcccctcaataaaagcaattccaacct

SEQ ID NO: 4388 - DNA, 600 bp, Phodopus sungorus
tgcaggcatcggaagccgcctcctggcaggtagcaccacaggtgccctggctgttgccgtggcccaacctacagatgtggtaaaggtccgcttccaggctcaggcccgggctggcggtggtaggagataccagagcactgtcgaagcctacaagaccattgcacgagaggagggaatccgaggcctctggaaagggacctctcccaatgttgcccgtaacgccattgtcaactgtgctgagctggtgacctatgatctcatcaaagatactctcctgaaggccaacctcatgacagatgacctcccttgccacttcacttctgcctttggggcgggtttctgcaccaccgtcatcgcctccccagtcgatgtggtcaagacgagatatatgaactctgccttgggccagtaccacagcgcaggccactgtgccctcaccatgctccggaaggaggggccccgagccttctacaaggggttcatgccttccttccttcgcttggggtcctggaacgtagtgatgtttgtcacctatgagcagctcaaaagggccctgatggctgcctacgagtcccgggaggcacctttctgagctcctcc

SEQ ID NO: 4389 - DNA, 600 bp, Phodopus sungorus
  misc_feature (286)..(299): n is a, c, g, or t
  misc_feature (302)..(314): n is a, c, g, or t
cagttctacacccccaaaggagctgaccactccagcatcgccatcaggattctggcaggctgtaccacaggagccatggcagtgacctgtgcccagcccacagatgtggtgaaggtccgatttcaagccatgatacgtctgggaactggaggagagaggaaatacaaagggactatggatgcctacagaaccatcgccagggaggaaggaatcaggggcttatggaaagggacttggcccaacatcacgagaaacgccattgtcaactgtgctgagatggtgaccnnnnnnnnnnnnnnggnnnnnnnnnnnnnactctcacctgttcactgacaatttcccctgtcactttgtctctgcctttggagccggcttttgtgccacagtggtggcctccccagtggatgtggtaaagaccaggtacatgaacgctcccccaggcagatacctcagccctctccactgtatgctgaagatggtggcacaggagggccccacggccttctacaaaggatttgtgccttccttcctgcgtttgggagcctggaatgtgatgatgtttgtaacttatgaacagctgaaacgggccctggaaagtaa

SEQ ID NO: 4390 - DNA, 290 bp, Mesocricetus auratus; identical to SEQ ID NO: 748

SEQ ID NO: 4391 - DNA, 1374 bp, Cricetulus griseus
  misc_feature (327)..(344): n is a, c, g, or t
ctagaccccaccactcccaagttagcagttgatccaccagggtgtgcctctctagagaacactgaccataaagcttcttccctcggacagacgcctccagcacagcactcagagggttccttgtgtaaaggggacagtgatgactgtgggagtcgtcccagggagtgcactaccaacttggaaggctgggactcggtacctgatgaagcctatgacctgcttgacaaacttctggatctaaacccagcttcaaggataacagcagaggcagccttattgcatccattctttaaagatatgagctcctgaggtggttttccatttacnnnnnnnnnnnnnnnnnntgaggtggggtagataatcacaggttcttgtttgcatccaagtccagggaaggatgactaacttatttttaaagttacaatattttgctctgatgtcagattgtaagcagatggggaattattcaagatccagggggaggcctctatgtgatcttagagttaaaccaccaagtatagtcagatctttagttccctggttttctctgcttctggagcagccttagcctgatgcacgggtcaaggaacgggtcataaaggtcacagatgtgacagggagtaaatgagtgaaaaagactgtttccagatgtctgtggcctacgctgtgtatgcctggggaactggctcttggtggtgtacaggagagacagtgatctttcctataggtgtgcatataaacacagttaccgcagggacataggggaaatgacaccactcaatatagttgtttcctgtaagttacacagtgcttactgcagagtttctggttcttcattaggtgtatttatttatattgggaacctaataatgtgcagattgttgacgaggcagaagtctttttctcgtacagctattttgtcacactatcttagtttaattaggtaattgccacaaggaaaggtgagggtacaactgggaacattactgggttttgtcttccaggagtacccagacttctgcatttctgacctaagttgaccttgctcagagagtaatggtcattgcagtctcaggtggattgggaggaaatacaatgacgtagacaaagcagcaaagggcttgcacggccatctatgcattttttacattctgaactgccctgtgtttgtgatagaatgccagggttcccaggggtcaggaggataaacttgctgaagagttcccttcgtataatcacaggtcatcagtatattcactttcctgttttgaatcctgatagatcaatgtgtgtacacactttgtcttatgctgtatttttttaagcttgaatgtttttggaatatgtatttaataaatgtttcctttcagattc

SEQ ID NO: 4392 - DNA, 591 bp, Cricetulus griseus; identical to SEQ ID NO: 750
  misc_feature (497)..(515): n is a, c, g, or t

SEQ ID NO: 4393 - DNA, 600 bp, Cricetulus griseus
tgagaggaacaatgtctcccgaggttgaggatctgaatcttctgcgttgctcgaggtctggaagaacggggaggttggcactccctgacgcaggcgctcaccagcagcctaactctgtttggggacccttaccgtagtattcgaggccctggatggacgggacatcagatacgcgcagagccaatggttatggactagagagtcacggattgggcggggctaaaaggggcggggcttaggataaggggcggtgacgagtagagggggcggagccacagggctgaggggcgggacgcgcgatagtgccaaactagggtgagagtgcgaagatggcagctgctgaggagccaaagcccaaaaagctgaaggtggaagcgccacaagcgctgaggtgagagccgccaacgtggggaggagggagacggcatttgcggcgagccaaggcccacgtgggctggcgctgctgcgtggtgtttgcgttcgtggggccaacacgcgggacctgcagctcggggagttgccctcgtggctgcacattgaccccttggtttgaaccgtgctcaggtgctttcccggccctggcagccattgaccaatcag

SEQ ID NO: 4394 - DNA, 469 bp, Cricetulus griseus; identical to SEQ ID NO: 752

SEQ ID NO: 4395 - DNA, 312 bp, Cricetulus griseus; identical to SEQ ID NO: 753

SEQ ID NO: 4396 - DNA, 433 bp, Cricetulus griseus; identical to SEQ ID NO: 754

SEQ ID NO: 4397 - DNA, 269 bp, Cricetulus griseus; identical to SEQ ID NO: 755

SEQ ID NO: 4398 - DNA, 600 bp, Cricetulus griseus
  misc_feature (476)..(509): n is a, c, g, or t
actgattatgaattttttcactctattaatagactaaagacattaaagagatagccaaaaaggcacaggctcttgcaaaggtgaactcgaagaggccgaggaccgtggtcttcacacaagggagagacgacactgtagtggctacaggtactgttggaactatgtgaaaaatccagtgctaaggagattaatcatgacaaattctatagtctttctatcacgtgtcttttacagtttaactatattcctctcctttcaagattacaatttacgtttattgatgtagcttgtttacttttaaagtttggggggatttttttagcccagaaatatctttcttttcaaacataatacgttttacatataaacatttattcagttatgagcaagtaaagtccaaaatgtttcttctgattttctttcctgtcattattaatttgtcttgtttttgcaatagtaggaatttattatttttnnnnnnnnnnnnnnnnnnnnnnnnnnnnnnnnnntcctggatctcactatgtacatgaagctagcctccacctcacagagattcacccacccctatctcatgcccagcctaatgctgaaaagctt

SEQ ID NO: 4399 - DNA, 1122 bp, Cricetulus griseus; identical to SEQ ID NO: 757
  misc_feature (78)..(94): n is a, c, g, or t

SEQ ID NO: 4400 - DNA, 77 bp, Mesocricetus auratus; identical to SEQ ID NO: 758

SEQ ID NO: 4401 - DNA, 534 bp, Mesocricetus auratus; identical to SEQ ID NO: 759

SEQ ID NO: 4402 - DNA, 507 bp, Mesocricetus auratus; identical to SEQ ID NO: 760
  misc_feature (26)..(26): n is a, c, g, or t
  misc_feature (173)..(204): n is a, c, g, or t

SEQ ID NO: 4403 - DNA, 379 bp, Mesocricetus auratus; identical to SEQ ID NO: 761
  misc_feature (148)..(209): n is a, c, g, or t

SEQ ID NO: 4404 - DNA, 285 bp, Mesocricetus auratus; identical to SEQ ID NO: 762

SEQ ID NO: 4405 - DNA, 1400 bp, Cricetulus griseus
  misc_feature (1003)..(1027): n is a, c, g, or t
  misc_feature (1284)..(1325): n is a, c, g, or t
gggccgtatccgctggcgcgctggagcctgggtccgctacagcggctcaccggcgcctcaagtacatatccttagctgtgctggtggtccagaacgcctccctcatccttagcatccgatatgctcgtacactgcctggtgatcgcttctttgccaccaccgctgtggtcatggctgaagtgcttaaaggtgtcacctgtctcctgctgctcttcgcccagaagaggggtaatgtgaagcacctggttctcttcctccacgaggctgtcctggtgcaatatgtggacacactcaagctcgcggtgccctctctcatctatactttgcagaataacctccagtatgttgccatctccaacctgccagctgccactttccaggtgacatatcagctcaagatcctgactacagcactgttctccgtgctcatgttgaaccgcagcctctcacgcctgcagtgggcctccctgctgctgctcttcactggtgtggcgattgtccaggcacagcaagctggtgggggtggcccacggccactagatcagaatcccggggccggactagcagctgtggtggcctcctgtctctcctcaggctttgcaggggtatactttgagaagatcctcaaaggcagctcaggttctgtgtggctgcgtaacctccaactaggcctctttggcacagcactgggcctggtggggctctggtgggctgaaggcactgctgtggcccgtcgaggcttcttctttggatacacgcctgctgtctggggggtggtactaaaccaagcctttggtgggctactggtggctgttgtagtcaagtacgctgacaacatcctcaagggctttgccacctccctgtctattgtgctgtccactgttgcctccattcgcctctttggctttcacctggacccattatttgccctgggcgctgggctcgtcattggtgccgtctacctctacagccttccccgaagtgcagtcaaagccataacttnnnnnnnnnnnnnnnnnnnnnnnnntgggccctgcattcaccagcagcctcctgggcagccaccaccaccaccgcagctgtcttctcgaggagacctcatcacggagccctttctgccaaagttgctcaccaaggtgaagggttcgtagctgctggaattgaagacactggcctgccttcgttctccctctcttgccctggcccagctgggactaaactcttatcagtattaggggtagggtgagggagacatgggaattgcctgtcccaccaaccctgccnnnnnnnnnnnnnnnnnnnnnnnnnnnnnnnnnnnnnnnnnnctgaactcctgctatctttgcagtatttcttaggtaagtttctgcaaataaaatgtattttgcatcttgaaaaaa

SEQ ID NO: 4406 - DNA, 517 bp, Mesocricetus auratus; identical to SEQ ID NO: 764

SEQ ID NO: 4407 - DNA, 600 bp, Cricetulus griseus
ggagacaagcactgggtgtttgacgaggcttccctggaacctgggtaccccaagcacattaaggagctaggccgaggactacctactgacaagattgatgcagctctcttctggatgcccaatggaaagacctatttcttcaggggaaataagtactaccgtttcaatgaggagttcagggccgtggacagcgagtaccctaaaaacatcaaagtctgggaaggaatccctgagtctcccagagggtcgttcatgggtagtgacgaagtcttcacatacttctacaaggggaacaaatactggaaattcaacaaccagaagctgaaagtagagcccgggtaccccaagtcggctctgcgggactggatgggctgcccttcagggggccgacctgatgaggggactgaggaggaaacagaggtgatcattatcgaggtggacgaggagggcggcggagctgtgaatgccgccgctgtcctactgcccgtgctgctgctggtgctggtgctggtggtaggccttgcagttttcttcttcagacgccatgggacccccaagagactgctttactgccagcgttcactgctggacaaggtctga

SEQ ID NO: 4408 - DNA, 1400 bp, Cricetulus griseus
  misc_feature (1050)..(1090): n is a, c, g, or t
  misc_feature (1128)..(1144): n is a, c, g, or t
  misc_feature (1146)..(1175): n is a, c, g, or t
aatgtgggtgtcagtgaggaggcttcagcaactatggggcctctggtaggagatcagtatttattcctggtgtacgatggactttgggagcctattctacatggaaggatgctctttctgcctggacacattcagggagggcctaggccctgcccttgatgatatgacagactttgggaatcccttatggagggcctcatgctccctggggagccgaggggggatggcatgaggattagtgggggtcaggggaggagggaaaggagagggagctgggattggcatgtgaagcaggcttgtttccaatttaaattaaaaaatataaaatataaaatatggggagtggcatgtctattgtaagattattgaaaaaattatatataattcagctaaagagcctccatagtatctggattatttatggtggcatgtccttccatagcaaaaaaatgctaaaaccccagtggctgaataccatacaaatatagtttttgcacaaagtccagctcatagattttcattcagtggttcttcaggaccagcctcttcccatctcattgtattccattcagggttttaggacatttccttctagactgcagaggggaaaagagcctaaagacaacaccttggtggctttctttagcaagtccaggaactgaacacctcactcttgtcagcagtccatgaccttactcagccactcaactgcaaatgtaactgagatacccaatagaagagcatacctccatatcctaggcacagccattgcaatcaacactatatcagacattgttgattgtctcctgatgggcagcagcacactatcaaccacaagtttaatggcaatgcttttcttaacattgataaagtaaacaagtaatgaagaacaggaagagcaataagatataaaataaagaaaggacttggatgaaagggataaatattttaatgctgttgcaatggagttcagagccaatatgcagtattaaactaagagatttgattagtgttaaagagcacatctgactgttcattttcattttttcnnnnnnnnnnnnnnnnnnnnnnnnnnnnnnnnnnnnnnnnngagggttaggcttagggtgagggttagggttagggtgnnnnnnnnnnnnnnnnngnnnnnnnnnnnnnnnnnnnnnnnnnnnnnnccctactctgaaatatttgtaagatctcagtcaacatttagcctttcattctgttcttcttaagggctcgctctcctggttttttctttgttttcttttggttctgagtgtgtgatttgaaagagtcgggatgagatgagaggggagaaattctgttcatcctaagcatttctcaataaacaatattcttaggctgtgggtcacaacctcatatagaattgtgcc

SEQ ID NO: 4409 - DNA, 600 bp, Cricetulus griseus
atttggatttgtttcattttagcaagtcatcataatgaattttttaagagggttttaattctacttgctgtgtatttttcttgaatagagaacatttgtcttagaattttgtgaggtctgtaaccatatgtttttgcatatagtctcttatgtaaggagtttcagtgaaattttctttgttaatatcacctccagataaatctttaattaaaaggtttgaatctttattcagcagtgtgaaatgctttgataagaatttctaagcataattacttatagaaaatttgcatatggtgggaataatgttcaaagacctggaagacatttgtaaaatttgtacttcagtggagctacctaaatatataaaatataacttatgtagctcaagaagactatttttataactatgttttattttggaaaaaagcagatgttttattatctttcaggaagggaatgattttgcttaaaatgttatttcctatgatatatcactttatataaaatgtgtttaaagtaagaaaacatcttattaagactctagagatgttatatttggaaatgccacactggattaaaaagttataacttgctaagctt

SEQ ID NO: 4410 - DNA, 600 bp, Cricetulus griseus
taaggaggaaatttcttcattaatactataatttctgctggatgtattccagtcagttgatgaagtcttaatttgccctttaaaatgaaatcagaaatcttttctatatatgtctttaactttttattctgttttgtggcagaaatatccactccaatatggtctcttgcctctgcatcagaattccagaagtatattttttggatggcaagataaccagaatacagtctaaatcaaggtttatctgatctacatgcacatccaatattctgttttctacccattgtaattctttttctgcctttgcggataatatttgtggactgtttaggtccttaaaggccattgttaaaggctttaagtcatgaccttctaccccaataatcatctgaatttgagaaatttctcctagcaagcagcttctgaagacattatttgtaatagccagaacctggaagcaagctagatgcttctcaactgaagagtgaatagagaacatgtggtaccattttcacaatgcaagtactgctcatctggggaacaaaaactcaatgaaatcttaaaattcgaaagcaattggatggcactagaagaaacctt

SEQ ID NO: 4411 - DNA, 215 bp, Cricetulus griseus; identical to SEQ ID NO: 769

SEQ ID NO: 4412 - DNA, 205 bp, Cricetulus griseus; identical to SEQ ID NO: 770

SEQ ID NO: 4413 - DNA, 433 bp, Cricetulus griseus; identical to SEQ ID NO: 771
  misc_feature (397)..(397): n is a, c, g, or t

SEQ ID NO: 4414 - DNA, 204 bp, Cricetulus griseus; identical to SEQ ID NO: 772

SEQ ID NO: 4415 - DNA, 600 bp, Mesocricetus auratus
  misc_feature (464)..(482): n is a, c, g, or t
ggcttcaggtccagcccaaagacccctcccaggaggccagttcctgttgctgactgtgaaccacccccagtggataggaacctcaagccagacagaaaagccaagccggcacctctggaaataaagccgctgccggagtgggaagagctacaagccccggtcagatctcccatcaccaggagcttcgctcgggactcctctagattccccttgtcccctcgacctaactctgtgcacagcacgacatcgagcagcgactcccatgacagcgaagaaaactacgtccccatgaacccaaatctgtccagcgaagatccgaatctctttggcagtaacagccttgatggagggagcagctctatgatcaagcccaaaggagataaacaagtcgaatacttagatctagacctagattctgggaaatccacgccacctcggaagcaaaagaacagtggttcgggcannnnnnnnnnnnnnnnnnnggtggactacgtggtggtggaccagcagaaaactctggccctgaagagcactcgggaagcctggacggacgggaggcagtccacagagtcggaaactcccaccaagagcgtaaagtga

SEQ ID NO: 4416 - DNA, 600 bp, Mesocricetus auratus
  misc_feature (354)..(379): n is a, c, g, or t
cagctcaatctcactgtgatggccaaacccaccaactggatcgagggcacccaggcagtgcttcgagccaggaagggacaggatgacaaggtcgtggtggccacctgcacctcagccaatgggaagcctcccagtgtggtgtcctgggaaacacgactaaagggcgaggcagagtaccaggaaattcggaaccccaatggcacagtgacagtcatcagccgttaccgcttggtgcccagccgggaagcccaccggcagtccctggcttgcatcgtcaactatcacctggaccgcttcagggagagcctcacactcaacgtgcagtatgaacctgaggtgaccattgagggcttnnnnnnnnnnnnnnnnnnnnnnnnnncagatgtgaagcttacatgcaaagcggatgccaaccccccagccaccgagtaccactggaccacgttgaacggctctctccccaagggtgtggaggcccagaacagaaccctcttcttccgaggacccatcaactacagcctggcaggaacctacatctgtgaggccaccaaccccattggcacccgctcaggccaggtggaggtcaatatcacagaattc

SEQ ID NO: 4417 - DNA, 188 bp, Cricetulus griseus; identical to SEQ ID NO: 775

SEQ ID NO: 4418 - DNA, 91 bp, Cricetulus griseus
ttgctgtcatgaatgtagttcaccctgatgagccacaccctggcattggcaaacagctcacacagggcagagagggaaggagccaggacag

SEQ ID NO: 4419 - DNA, 208 bp, Cricetulus griseus; identical to SEQ ID NO: 777

SEQ ID NO: 4420 - DNA, 148 bp, Mesocricetus auratus; identical to SEQ ID NO: 778

SEQ ID NO: 4421 - DNA, 600 bp, Cricetulus griseus
aaccaggctggagacaccatgttcaatcgagctaagcttctcaacataggcttccaagaggccttgaaggaccatgactacaactgctttgtgttcagtgatgtggaccttattccaatggacgaccataatgcctacaggtgtttttcacagccccggcacatttctgttgcaatggacaagtttgggtttagcctgccttatgttcagtactttggaggcgtttctgccctcagtaaacaacagtttcttgccatcaatggatttcctaataattattggggctggggaggagaagatgatgacatttttaacagaatagttcataagggaatgtctatatcacgcccaaatgctgtagttggaagatgtcgcatgatacgacactcaagagacaagaaaaatgagcccaatcctcagaggtttgaccggattgctcacacaaaggaaactatgcgctttgatggtttgaactcacttacctaccaggtgttgaacgtagagagatacccattatataccaaaatcacagtggacatcgggacaccaagatagcattgtggaacaaataacagacctgaaaatggccaggggctcaga

SEQ ID NO: 4422 - DNA, 600 bp, Cricetulus griseus
acgcagtacacggtggacatagatgaccgctctggggactatgcctgcatcttccttcctgagcccgtgggcaggagcaacatcgttgtggaggggccacccaggatcaaggtcgggaagaagtcagaacattccagtgagggagaaaatgtgaggctgatctgcaagtctgagtcatctcacccccctgtcactgagtggtcctggtttaagacctctgactctggggaccagctgatcaccaacagctctgagagcaagtacgtcgtgatatccacagctgacagatcagagctgaccatcagcaaccttgacataaatagtgaccctggtacctacatgtgtaacgccaccaacacccagggcagtgtccaggagataatgacactgcgtgtgcgaagccgcctagcagccctctggcccttcctgggcatcgtggctgaggtcctggtgttggtcactatcatcttcatttatgagaagcgacggaagccggaccagaccctggacgaggatgaccctggtgccgccccactgaagggcagtggtcatcacatgaacgacaaggacaagaatgtacgccagaggaacgccacctga

SEQ ID NO: 4423 - DNA, 600 bp, Phodopus sungorus
tggccaatataatgaaggaaataagccttctcccagacaatctcctcaggacgccatcagtacagttggtacaaagttggtatatccagagtcttcaggagctgcttgattttaaggacaaaagtgctgaagatgctaaaactatttatgaatttacagacacagtgataaggatcagaaaccggcacaatgatgtcattccaaccatggcccagggtgtgaccgaatacaaggagagcttcggggtggatcctgtcaccagtcaaaatgtccagtactttttggatcgattctacatgagtcgcatttcaattagaatgttactcaaccagcactctttattgtttggtggaaaaggaagcccatcttatcgaaaacacattggaagcataaatccaaactgcgatgtagtcgaagtcattaaagatggctatgaaaatgctaggcggctttgtgatttgtattatgttaactctcctgaactagaacttgaagaactaaatgcggtctcaccaggacagacaatacaagtggtttatgttccatcccatctctatcacatggtgtttgaactgttcaagaacgcaatgagggccacca

SEQ ID NO: 4424 - DNA, 547 bp, Phodopus sungorus; identical to SEQ ID NO: 782
  misc_feature (320)..(345): n is a, c, g, or t

SEQ ID NO: 4425 - DNA, 482 bp, Phodopus sungorus; identical to SEQ ID NO: 783

SEQ ID NO: 4426 - DNA, 1400 bp, Mesocricetus auratus
ccagtattacaagagacccataggggtcctgtttaagagttcagaagcttggaagaaagatagacttgtcctaaaccaggaagtgatggcacctgaagccatcaagaacttcgtgcccctgctggaaggtgtagttcaggacttcatcaacgtcttgcacagacgcatcaagcagcagaagtctggaaatttctcaggggacatcagcgatgacctgttccgctttgcctttgagtccatcaccagtgttgtatttggggagcgcctggggatgttggaggagattgtggaccctgagtcccagcggttcatcgatgccatctaccagatgttccacaccagtgtccccatgctcaacctgcctccagaactttttcgattcttcagaactaagacctggaaggagcatgcagctgcctgggatatgattttcaaaaaagctgatgattatacacagaccttctactgggacttaagacagaagcaagagttcagcaagtaccctggtgtcctttacagcctcctgggtggcaacaagctgcccttcaagaacatccaggccaacattacggagatgctggcaggaggcgtagacacgacctccatgaccctgcagtggagcctttatgagatggcacacaacttgaaggtacaggagatgctgcgggcagaggttctggctgcccggcgtcaggcccagggagacatggtcaagatggtgcagttggtcccactcctaaaagccagcatcaaggagacactgagactccaccccatctctgtgaccgtacagaggtatcttgtggatgacctggtacttcgaaattacaggattcctgccaagatgttggtgcaggtggctaactatgccatgggccgagaacccagcttcttccccaacccaaacaagtttgacccaactcgttggctggaaaaaagcaaaaataccacccacttccgttacttgagctttggctggggtgttcgtcagtgtctgggccggcggattgcagagctggagatgaccatcttcctcatcaatgtgctggagaactttagaattgaactccaaagtctccatgatgtggggaccaagttcaacctcatcctgatgcctgagaagcccatcctcttcaacctccagcctctcaagaaggaccttgggacaaccacgaacagatagggtggcactgtctgaacttcagactggagtcacatggggagatggcccagtgggggcatttgggtgggtgtctctgtatctccagaaaaacctgctcctttggggtggttcttagctctcagtggccaactgcttaggttagccaggccctcctctccttcatcctctctcctttacttaccctgaaggttaataaacacatgaactctgaaaaaaa

SEQ ID NO: 4427 - DNA, 537 bp, Cricetulus griseus
gtggaaagtgttggagatattaaatcatgttgccatttattctcttttccacgctgcttcctctcatatttactgaatctgaacagcaactgtggttctgcaactcctccgatgcaactttttcctacagttactgtgatagcatgaagttccctttttcgattactgctgaaccctgtataacattgaagggaaccaatggatttttacatattaagttcatcccaaggagagacttaaaaaaattatatttcaacctctccatcaatgtcaactccatagaggtgccaactcgaaaagaaattatttgccacggatatgatgacaattattctttctgcaaagctctgaaaggagagactgtgaatacagtagtaccattttccttcaagggaatactatttcctaagggccaatacagatgtgttgcagaagccattgtaggggataatgaagaaaagttattttgtttgaattttaccatcattcaccaccctaatgtcaattagaataaattaagaatatatgtttttattt

SEQ ID NO: 4428 - DNA, 311 bp, Mesocricetus auratus; identical to SEQ ID NO: 786

SEQ ID NO: 4429 - DNA, 600 bp, Cricetulus griseus
ccgatgacccactctgcatgatcacagaatacatggaaaatggagatctcaatcagtttctttcccgccacgagcctctgagttcttgttccagcaatgccacggtcagttatgtcaacctgaagtttatggctacccagattgcctctggtatgaagtatctctcatcccttaactttgtccaccgagatctggccactcgaaactgcttagcgggcaagaactacaccatcaagatagctgactttggaatgagcagaaacctgtacagtggtgactactaccggatccagggccgggcagtgctccctatccgctggatgtcctgggaaagcatcttgctaggcaaattcaccacagcaggtgatgtgtgggcctttggggtgactctgtgggaaactttcaccttttgccaggagcagccctattcccagctgtcagatgagcaggttattgagaatactggagagttcttccgagaccaagggaggcagacttatctccctcaaccagctatttgccccgactctgtgtataagctgatgctcagctgttggagaagagagaccaagcaccggccatcattccaagaaatacacc

SEQ ID NO: 4430 - DNA, 1400 bp, Mesocricetus auratus
  misc_feature (1171)..(1203): n is a, c, g, or t
ctgtcgattgtgctgtccactgttgcctccattcgcctctttggcttccacctggacccattatttgccctgggcgctgggctcgtcattggtgccgtctacctctacagccttccccgaggtgcagtccaagccataacttctgcttctgcctctgcctccgggccctgcattcaccagcagcctcctgggcagccaccaccaccgcagctgtcttctcgaggagacctcatcacggagcccttcctgccaaagtcagtgctggtgaagtgagagctggtggtggttgggagagctggggcggggggtgggggttgggtttgaggggggttagcttctgctggtccagaagttgttgccaggcctgacttgtggggttggagggcttttttttttctcccacacttctagagggatatggaagtagggctgaatgtcacatgaacccttcctggtagatggactcccctctcctgaaggagctgcttcctttgccccaggctatcctctttgggaacagggttggggtaccgctattcccggctttccctcgtgaccctctgctggaaatgtcctgtctctcatgcctgggacagttcatcccagccatcctacagactggacaaaagcccagcagttcttcagtaacgactaatgactactcgtggggttccatttcctattgtatgaggccttctctcgtgcaccattaccctggatcatgtcaacagcttgggctctgctgtggctttggggcagtttccctggtacagagacccttgaagatcggccttttgtaagtgcctggagtgaggacagaggcacaagctgagaattgggcagcagttcatcttggggaaggtgcaataagcaccgttcactttttaatagttggggcatttgtgataatcagattaatgatccagagtgttgggaaaatgggaaggggagatctttgaagtgactgaatcttgtgtaattgaagagacagaaatgaaggattatcttctgggacatccagagaggaaaaataaagctgccaatgcactttcacagccccattggctgtttaaacacccttacttcatggcgggtatcagaattgatgaattgtggaacctgcacccctgcgctccccaaagcttactaactccttaactgtatccaagannnnnnnnnnnnnnnnnnnnnnnnnnnnnnnnngcgtgtgtatgtgtgtgtgcgcgcacacataaatacacgcatggaaggtgcctgggctgtctttgctatatgtaaataggaccattggatctttatttttgattaatttgttctgatttgggggggtgttgttttctaaggaactgtaatgaacatgtcaggatacccaatgccaaataaagatgttgtatttattt

SEQ ID NO: 4431 - DNA, 600 bp, Cricetulus longicaudatus
cctggagctgtggtgatgccccaggctgcttcactgtatgctatgatcgtggagttcagggatttgtggcggatccggagcccttgtggtgactgcgaaggttttgacgtgcacatcatggatgatatgattaagcactccctggattttcgagagagcagagaggcagaaccccacccattgtgggagtacccctgccgcagcctttctgagcctcagcagattctgacctttgatttccagcagcctgtgccccagaagcctgtgcatgctgagggctccatggaactgagaagacctgggaagagccatggtgctgtcctgtggatggaatatcatctgactccagacagcacagtcagcaccggcctcatgaatcctttggaagacaagggggactgctgctggaacccccactgcaagcaagctgtgtacttcctcagcaccacagtggatcccagagtgcctctggatggccctcagtctgtcagctatgctgtggagtttcatcccctcactggagacatcaccatggagtttaggcttgcagacaccttgaactaattccctcattgagaaattaaatggccaataggctgc

SEQ ID NO: 4432 - DNA, 471 bp, Mesocricetus auratus; identical to SEQ ID NO: 790

SEQ ID NO: 4433 - DNA, 387 bp, Mesocricetus auratus; identical to SEQ ID NO: 791

SEQ ID NO: 4434 - DNA, 600 bp, Cricetulus griseus
tcctatatctctgccaatgtcactggcttcaaatgtgtgacgggaatgtcttgtttaatgaggaaggatgtgctagatcaggccggagggctgatagcctttgctcagtacattgctgaagattactttatggccaaagcaatagctgaccgaggttggcggtttgcaatgtctactcaagttgccatgcaaaactctggttcatactcaatttctcagtttcaatccagaatgatcaggtggaccaaattgagaattaacatgcttcctgctacaataatttgtgagccaatttcagaatgctttgttgccagtttaattattgggtgggcagcccaccatgtgttcagatgggatatcatggtcttcttcatgtgccattgcctagcatggtttatatttgactacattcaactaaggggtgtccagggtggcacactgtgtttttcaaaacttgattatgctgtggcttggttcatccgagaatccatgacaatatacattttcttgtcggcattatgggaccctactataagctggagaactggtcgctacaggttgcgttgtggaggaacagcagaggaaatcctagatgtataa

SEQ ID NO: 4435 - DNA, 600 bp, Mesocricetus auratus
gttctgtcactgattcagaaacttcttagcgagagccctttcagctgtgatgatctacctgaaggtgaaaataagcgttctgatcctagatcaagcaaaactggtcccatggccaagagacctgaagatcaatgcccagacagttcagaacaggacttcatcagtgggatgaagcaaatgaaccgccaatttatagaccaactggtagaatccgtgatgaaactgtgcctgatcatggctaagtatagcaacaatggagcagccctggcagagctggaagaacaagcagccatggcaggtggtagctccagatgcggccgtgaaggtgcaatgtcacagtatcaagatgctcctggccctgaagttattgtcaacaatcagtgctctacaagtaacttgcagaagcagctgcaggctgtcctgcaatggattgcagcctctcagtttaacgtgcccatgctctacttcatgggagatgacgatggacaactagagaagctccctgaagtttcagccaaggcagcagagaaagggtacagtgtcggcgatcttcttcaggaggtcatgaagttcgccaaagaacgacaaatggatgaagcc

SEQ ID NO: 4436 - DNA, 600 bp, Cricetulus griseus
  misc_feature (82)..(116): n is a, c, g, or t
cctgttgtgcaaagatttgcagttcacctacttgctggggcaccgtctgaaggctccgaggccctcaagcctgagctgagcnnnnnnnnnnnnnnnnnnnnnnnnnnnnnnnnnnncatggcagcaatgacattcaaccctcctgttgaaccttcaaactccaaaaagaaggataaacttttacaaggggactcatttttgaatgaagatttaaatcaactaatcaaaagatattgcaatgaagttactactgagataccactggatttcaccaaatgtttgaaaacatctgtacagtagtacaaaggtgaagagtcagtggactgtcttatatatctgtatgtgtctgtgcagctacacgagggcctttttctttgtgttgaaggaaaacttcctaaggatgactataggatgactgaagcagagcccacagaagacactgctgttggtttgctgtttatggcttgcttttatgtacagccccggccaacttgctcaggagtggcactgtccactatgggctgggccctaccacattagtcactaattctataaatgccctacagacatgcccacaggcaagtctgatggaggcagcaa

SEQ ID NO: 4437 - DNA, 1379 bp, Cricetulus griseus
aaagcagagagccatccagtcggatcgggaaaatacaagcaaatttagcaattaatccagcagccttgctgcccacggcagctctgcagatcccaggaacaaagcctgctttatgtgaattagcttttccttcatctgaacctggaaggagccatggcccggaaagcgtgccgactcttgctgggagtgaggaggctggtgtgagcttcgatcttccagcccaggcagataccttacacagtgcaaacaagagtcgtgttaaagtgagaggaaagcgtaggccacagacccgcgctgctaggcggctggctgcccaggagtccagtgagagtgaggatatgagtgtctccagaggacctgttgcacagttggccagtagtcccatcttaccaaatggccatcaacctcatctgcagcccaggatggccagtggagagatcagctctgagaaagccatggccccagctgctccaccttgggaaagtggtcctgcattgtctgcagtggacagaagcttttttgtggcgtctctgcctcagactggaaatgaggctgacctttttgattctggggacatctttccaaagagcataggatcacagtccatggagggaacaaaagtcaaggcagcagagaccccagcccacttgtcaggaggaagtaaagagaagagcctcgtgttccctgctctcagtgaggccagcagtactgacgatctcttccagactgtcaaaccaagaccagcaaagaaaaggaacccttttcccctccttgaagatgaggatgatctctttgcagatcggaaaggaaaaaagaatgagttgaaatctgacagccatcaggacattatatcaaaaacacaagacatttttgaggatgatatatttgctacggaagctgtgaaaccttttcaaaaaaagagagagaaggagagaactttggaacccaacttatttgatgataatatcgatatctttgctgacttaaatgtaaaacccaaagaaaagtccaaaaagaaagtggaggccaagtctgtgtttgatgatgacacagatgatattttctcctctggtctccaggctaagaagtccaaacccaaaagccaatctgcagaggccacatctgaactaagatctgatcacaaagtgtccaacatttttgatgaccccctgaatgcctttggaagccagtagagcatatggggtcttcatagttcatcttaccattctatttccagttagtgatgctgtcttctacactctgtcttcactggattccaaaagcaaatactgaaacaactagttcaactgttactcaatgtaactaatatttttctgcactgactttatgcttaaggttacaaataaaatacatgcttc

SEQ ID NO: 4438 - DNA, 156 bp, Cricetulus griseus; identical to SEQ ID NO: 796

SEQ ID NO: 4439 - DNA, 266 bp, Cricetulus griseus
cagttttatccggtaaagtgaatgattagaggtcttggggccgaaacgatctcaacctattctcaaactttaaatgggtaagaagcccggctcgctggcgtggagccgggcgtggaatgcgagtgcctagtgggccacttttggtaagcagaactggcgctgcgggatgaaccgaacgccgggttaaggcgcccgatgccgacgctcatcagaccccagaaaaggtgttggtcgatatagacagcaggacggtggccatggaagtc

SEQ ID NO: 4440 - DNA, 507 bp, Mesocricetus auratus; identical to SEQ ID NO: 798

SEQ ID NO: 4441 - DNA, 600 bp, Mesocricetus auratus
  misc_feature (106)..(124): n is a, c, g, or t
  misc_feature (501)..(515): n is a, c, g, or t
aaggtcacctacaaagctccagttccaacagggggagtttattttgctgactcctttgatagagggtctctatcagggtggattttatctaaagccaaaaaagatnnnnnnnnnnnnnnnnnnnccaaatatgatggaaagtgggaggtagatgaaatgaaggacacaaagcttccaggtgataaaggacttgtactgatgtctcgagccaagcatcatgccatctctgctaaactgaacaagcccttcctgtttgacaccaagcctctcatcgttcagtatgaggttaattttcagaatggaatagaatgtggtggtgcctatgtgaagctgctttccaagacctcagaactcaacttggatcaattccacgacaagactccccagccagatgtgaaggaagaagatgggaaggaagaagagaagaacaagggggatgaagaggaagaaggagaagagaagcttgaagagaaacagaaaagtgatgctgaagatgatggnnnnnnnnnnnnnnnagatgaggaagatagaaaacctactgcagaggaggatgaaatcttgaacagatcaccaagaaacagaaagccacgaagagagtga

SEQ ID NO: 4442 - DNA, 600 bp, Cricetulus griseus
  misc_feature (295)..(351): n is a, c, g, or t
aggaaagggaagccctgtacagtagggttttgtgacatgaacggcaaatgtgaaaaacgagttcaggatgtaattgagcgattttgggatttcattgaccaattgagcatcaacacttttgggaagtttttggcagacaacatcgtagggtccgtcctggttttctccttgatattctggattccattcagcattcttgtccactgtgtggataagaaactggacaagcagtatgaatccctgtctctgtttcatcacagtaacattgagatgctgagcagcatggattcggctnnnnnnnnnnnnnnnnnnnnnnnnnnnnnnnnnnnnnnnnnnnnnnnnnnnnnnnnnctgcagccagtctccatgatgccgccagtgtctgcggctccaaaactggaccaccagaggatggacaccatccaggaagaccctagcacagactcgcatgtggacgacgatggctttgagaaggacccctttcccaacagcagtgcagctgctaagtcttttgaggatctcacagaccaccccgtcaccaggagtgaaaaggcggcctccttcaagctgcagcgtcagagccgagtcgacagcaaagag

SEQ ID NO: 4443 - DNA, 306 bp, Mesocricetus auratus; identical to SEQ ID NO: 801

SEQ ID NO: 4444 - DNA, 328 bp, Mesocricetus auratus; identical to SEQ ID NO: 802

SEQ ID NO: 4445 - DNA, 600 bp, Cricetulus griseus
  misc_feature (299)..(331): n is a, c, g, or t
gttccagctgcaatagcaactatctttgcagaatagtggcatataagatgttattctttcataaaacaaaacccttagtgagtgagtttaaggtataaattacacaataaagttttaatgaactgtattttgtaaattaatcattaaaaggactattatccatttttagtgtaaaaataagtaatattctattttggtccaattaaagtgaggattgtagtatcttcactgtttttttcttctttttcatttgtatgtgtatgtgtgttcccatgtccatgcacttacatgtagaggannnnnnnnnnnnnnnnnnnnnnnnnnnnnnnnnccatgcatttttttatgtaggccagaagtcagtgaccttgatccccattccaccttaacgttttgagacaagctgggagggttgcccagcaagcccctaggattgtctcagctcccacctctgtagtcactgtcataagccactcactgtgcttggctttacatgagtgatggagatctacattcagatatctatgatcgagtagctgaaatttaccagctatgtgtctcccaagttcctcctccctgctttcctaagaaaaagaattc

SEQ ID NO: 4446 - DNA, 600 bp, Cricetulus griseus
catgaatgataacagacctgaatttctgcaccaggtttggaatgggtctgttccagagggatcaaagcctggaacatatgtgatgacggtcactgctattgatgcagatgacccaaatgccctaaatgggatgctgagatacaggatcctgtcccaggctccgagcacgccttcacctaacatgtttacaatcaacaatgagactggggatatcatcacggtggcagctggtctggatcgagagaaagtgcaacagtacacattaataattcaggccacagacatggaaggcaatcccacttacggcctttcaaacacagccacggcggtcatcacggtgacagacgtcaatgacaatcctccagagtttactgccatgacgttctacggcgaagtccctgagaacagagtggaagtcatcgtagccaacctaactgtcactgacaaagatcagccccacaccccggcttggaatgcagtgtacagaatcagcggtggagaccctacaggaagatttgccatccatacagaccccaacagcaacgatgggctcgtcactgtggtaaaaccaattgactttgaaacaaataggatgtttgt

SEQ ID NO: 4447 - DNA, 764 bp, Mesocricetus auratus; identical to SEQ ID NO: 805
  misc_feature (481)..(481): n is a, c, g, or t

SEQ ID NO: 4448 - DNA, 253 bp, Cricetinae gen. sp.; identical to SEQ ID NO: 806
  misc_feature (146)..(164): n is a, c, g, or t

SEQ ID NO: 4449 - DNA, 210 bp, Cricetinae gen. sp.; identical to SEQ ID NO: 807

SEQ ID NO: 4450 - DNA, 261 bp, Cricetinae gen. sp.; identical to SEQ ID NO: 808
  misc_feature (194)..(217): n is a, c, g, or t

SEQ ID NO: 4451 - DNA, 153 bp, Cricetinae gen. sp.; identical to SEQ ID NO: 809

SEQ ID NO: 4452 - DNA, 600 bp, Mesocricetus auratus
  misc_feature (514)..(542): n is a, c, g, or t
ttgttccttcttcatcgctaactacgtttaacaggtgagacagccccattaatgttccacaaatcagtataaagcagaagtcagaaatcagttttatatcatcccttgctaacctaatgacaacctacaccaaacacataaaatattaaaattaagcttagaggctattaaagttaaacgccttatttaattgtaacaacaaatacaaaagaaaatcatggaaaccagaccacaagatggctctgttacgcagtcatcgtggtgattcagaatacgtttatgttaaagctggccatgacagtgcattattataaccccagcactcagaagcaggcaaaagcagagcaggatggttacttagagtttgagaccaatttggtttacatagttagctccagattagccaagactactatgaaatctcctttttgtaactgaggaccaaacccaggaccttgttcttgataggcaagtgctctaccaatgagctaaatctccaacccaggatctaacnnnnnnnnnnnnnnnnnnnnnnnnnnnnnatgaatacaacatcctgcctctacatatgtctgcacgccaggagagggcaccagatct

SEQ ID NO: 4453 - DNA, 565 bp, Mesocricetus auratus
gttagatcctgggttggagatttagctcattggtagagcacttgcctatcaagaacaaggtcctgggtttggtcctcagttacaaaaaggagatttcatagtagtcttggctaatctggagctaactatgtaaaccaaattggtctcaaactctaagtaaccatcctgctctgcttttgcctgcttctgagtgctggggttataataatgcactgtcatggccagctttaacataaacgtattctgaatcaccacgatgactgcgtaacagagccatcttgtggtctggtttccatgattttcttttgtatttgttgttacaattaaataaggcgtttaactttaatagcctctaagcttaattttaatattttatgtgtttggtgtaggttgtcattaggttagcaagggatgatataaaactgatttctgacttctgctttatactgatttgtggaacattaatggggctgtctcacctgttaaacgtagttagcgatgaagaaggaacaatggtttttcatgagtcagataattgtctctcataacaaattaggcccaaggc

SEQ ID NO: 4454 - DNA, 600 bp, Mesocricetus auratus
gaagactagaggtgaccagtgactgtggcccagtaattagaactgtggtggcacaagtctggccccacatccacccaatccaaaactgataaggatattttgaaaaacaggaaagcagtacctgtctgatccagctctggtataggtaggagtgagtcctgaactgctggattacagactggcttgagccacagaagatgatggaccagagtaaagtatcatcacctgctcacaaggcatgcttcactagagaataattctaaagaggtgccatggaggcagcaggacaaggcacaagcagtctgggtgggggtcaagccagacctagtgccacagaacaagagagcaatctgtgactagtagttagggactttgtggatgggacaaggggcatgggggaagaaatgaaaatattcttccaattactttccagttctcctttagggacagcttagaattatttgcactattgagtcttcatgttcccacttaaaaacaaacagatgctctgaaagcaaactggcttgaaatggtgacactttgtcccacaagccaccaaatgtggcagtgtttagaactacctggatctgtatatacctg

SEQ ID NO: 4455 - DNA, 1400 bp, Cricetulus griseus
cagcatagacaacagtgacctgtcaggggagctggggggctgcaattcagaaagtggagtgcaggccagaggggaggttgagaatagcaagagtaaggaggattgcaccatgtcatgaggaggcagaggcagcaggcagacggggcgaccgagtttcagagagggccaaggactcaacacactaagcccaaccttaagaattctacccttcaactctactgcccaggttcacgaaatgttccagtttctgtgaacgtaccacgtgtcaatcaagtatcaacgactttaagttatagactgttacttgtagatttgtattcaaccattggtcatgtagacaccattgttttcagtttcagttctagctgagagcattccattagcatcaggtgacaccatgtcctgtcatgtctgcattccagtcttaagggcaaaacgtaaccatttgcttcaggccgggatgaatgttgactgtacttgaccaaatgtatcagcatctagttgaagtgaccaaacagcatgcttagatttctgtgtcttgagcagtgaatagtcaaactaccatgtctcattaaagtagatgtatcttcatgtttgatcttaatgtgtacgtcataacctgtgtggtattgtatttaaaggagttagatggataagtagcaggtaggtcactgggtgagaggaccagcacctcagggtagagattaattactgtagggattcaaacagttatcaaataacacagggagactacgtgcctttctttacctcgcctaagtgctgaattttgcaccaatgctcttggatcttattgccaatggtacccaaattaattttatccaagatctttatttcacttcacatgggtaatatgataaattcattttatacaaatattttatttttatccttttctgttaatgacaagttgaaattatatttcctactttagtgtttaggagaaagtcattaatttttttaactttaaagttatcttcctgtctgaatgtctacttattattaaaaaaaaaaacagtacaacacattgtttgttcttatgcaaaggactcattagacttgaatccaacattttgtgtttggtataaatatttttatttgttgtttctcagtattttctttttggaaagttattttacctgcctgaaggaaataatgtattttctatataaagaagcagttagaaaaaattatcataaagttgcattgaaaagtaattgcaaggccatgtactgtatgactactgttgacatgttacgggatcatgtgaattcatactactgctacaaggtagagtggaacgcaaaaagaccaaaccctcagtaaaatttgaggcaaactgaaatgtcatataattgaaataaaaacattttataatttta

SEQ ID NO: 4456 - DNA, 454 bp, Cricetulus griseus; identical to SEQ ID NO: 814

SEQ ID NO: 4457 - DNA, 600 bp, Mesocricetus auratus
ctgtttgtgtacaatcacttctgtatactctataatgagatatctaatgttacattcatgcactcttaaaacgactatgttcaaccatgttttaatttttgctttcatgctgccaaggtgagaacaggatggcaattatgcatcatattctcttgatcatggaatcagcatcacaaataaatcaccatttcattctacatgaattgtcccatctcctgtagagccaggataccacatatcaaattcctggcttagctttcctttcccatcacatgatgtattacctgttcttattttttgactgattaaataaattgtttcaagaaacaataaatgcctcgcaaaatgtatctcattcaaaaagcccataaatagtcactaagataattacaataatcactccggtgtaacaaatgatatccgcatcattacaaactattgtagtaattgaaatttcatcattcctggatagccatgggcaagaacagtgcagaagtgaagtttatgttgtgttccatatttactttcagttttaacttgagatttgcagttgaatggttctaacacactgaaataatttgtataacaaactctgtggtt

SEQ ID NO: 4458 - DNA, 600 bp, Cricetulus griseus
ctgacaagtatattaaggaaacaaacatcaaaaatgacccgattcaactcaacaatctcatcaagaaaaactgtgatgtggtgacatggaccccacgacctggagctactcttgacctgggcaggatgctgaaggacccaacagacagccagggcatcatagagcctccagaagggacaaaaatttacaaggattcatgggacttcggcccatacctgagcaccttgcactctgctgtaggagatgaaatcttccttcactcgtcctggataaaagagtacttcacttgggctggatttaagagttacaacttggtggtcaggatgattgaaacagatgaagacttcaacccttttcctggagggtatgactatctggtggactttctagatttgtcttttccaaaagaaagaccaagcagggagcatccctatgaagaaatccgtagccgtgtggatgtcgtcaggtacgtggtgaagcacggtctgctgtgggatgacctgtacattggcttccagacccggttgcagcgggaccctgacatataccatcatctgttttggaatcattttcagataaaactccctctaacaccaccca

SEQ ID NO: 4459 - DNA, 600 bp, Mesocricetus auratus
gtccttgccaacaagtctctcgggtcacgaattgacgactatgacattgtggtcagactgaattcagcgcctgtgaagggctttgagagggacgtgggcagcaagaccaccctgcgcatcacctatcctgagggtgccatgcagcgacccgagcagtacgaacgagactctctctttgtccttgcgggcttcaagtggcaggacttcaagtggctgaagtacatcgtctacaaggaaagagtgagtgcatccgatggcttctggaagtctgtggccactcgagtgcccaaggagcccccggaaatccgcatcctcaatccgtacttcatccaggaggccgccttcacgctcattggactgcccttcaacaacggcctcatgggcagggggaacatcccaacccttggcagtgtggcggtgaccatggcactacatggctgtgatgaagtggcagtcgcaggctttggctacgacatgaacacacccaatgcacccctacactactatgaggctgtgcgcatggcagccatcaaagagtcctggacgcacaacatccagcgagaaaaggagtttctacggaagctggtgaaagctcgcgtc

SEQ ID NO: 4460 - DNA, 600 bp, Mesocricetus auratus
  misc_feature (332)..(346): n is a, c, g, or t
gttgcggaacagttcactgggaagtatcatcaacaagtacgatgtggtcatcagattgaacaatgctcctgtggctggttacgaggcagatgtgggctctaaaaccaccatacgtctcttctaccctgagtcggcccacttcgaccccaaaatagaaaacaacccagacacgctcttggtcctggtagctttcaaggcaatggacttccactggattgaaaccatcttgagtgataagaagcgggtacggaaaggtttctggaaacagcctcccctcatctgggatgtcaaccctaaacagattcggattctcaaccccttctttatggagnnnnnnnnnnnnnnnctcctgagcctgcccatacagcagtcacgaaagatcaagcagaaaccaatgacaggtctgctagccatcaccttggccctccacctctgcgacctggtgcacatcgctggcttcggctacccagacgcctacaacaagaagcagaccatccactactatgaacagatcacgcttaagtctatggcggggtcagggcacaatgtctcccaagaggccctagccatcaagcggatgctagagatgggcgctgtgaa

SEQ ID NO: 4461 - DNA, 690 bp, Mesocricetus auratus; identical to SEQ ID NO: 819

SEQ ID NO: 4462 - DNA, 93 bp, Phodopus roborowski; identical to SEQ ID NO: 820

SEQ ID NO: 4463 - DNA, 93 bp, Mesocricetus auratus; identical to SEQ ID NO: 821

SEQ ID NO: 4464 - DNA, 390 bp, Mesocricetus auratus; identical to SEQ ID NO: 822

SEQ ID NO: 4465 - DNA, 489 bp, Cricetulus sp.; identical to SEQ ID NO: 823

SEQ ID NO: 4466 - DNA, 600 bp, Cricetus cricetus
  misc_feature (224)..(239): n is a, c, g, or t
cgagggtggactcaacagtgactatgtgcacctgtttgtggccacgctgcacttcccccacgcctccaacgtcaccctgtataaggaccagctacagatgtggattcgaggcaacgtgagtgcctgtgctcggtccatcttcatctttgacgagatggacaagatgcacgcaggccttattgacgccatcaagcctttcctagactattatgacgtggtagacnnnnnnnnnnnnnnnnaggccatcttcatcttcctcagcaacgccggggcagagaggatcacagatgtggctttggatttctggaaaagtgggaagcagagggaagaaatcaagcttagagacatggagcatgccctggccgtgtcggtcttcaataacaagaacagtggcttctggcacagcagcctcattgaccggaacctcattgattattttgtccccttcctgcccctggagtataagcacttgaaaatgtgtatcagagttgagatgcagtcccgtggctatgaagtagatgaggacattataagcaaggtggctgaagagatgacattcttccccaaggaggagagagtcttctctgacaagggctgcaa

SEQ ID NO: 4467 - DNA, 600 bp, Cricetulus griseus
  misc_feature (358)..(377): n is a, c, g, or t
cttggcccctagattagagaaaggggtctcctcccctttcccaagaaagcctcttctatgtgctcagcgatggggagcggggaacctaatattgctggcaagaaaaagaagtacctcaaggctgccctgtatgtgggtgacttgggccctgaagtgacagaggacatgctttataagaagttcagacctgctggccctctccgcttcactagaatttgccgtgacccagtgacccacagccccctgggttatggttatgttaacttccgctttcctgcagatgctgagtgggccttgaacacaatgaactttgatttaattaatggtaaaccgtttcgcctcatgtggtcacagccannnnnnnnnnnnnnnnnnnntggagttggaaatatattcatcaagcacttggataaatccatagataataggaccctgttttatttattttctgcttttgggaacattctttcctgtaaagtagtatgtgatgacaatggctctaagggttatgcctatgtccactttgatagccttgctgctgccaatagggctatctggcatatgaatggagtctggctcaacaaccgccaggtgtatgtc

SEQ ID NO: 4468 - DNA, 582 bp, Mesocricetus auratus
  misc_feature (171)..(197): n is a, c, g, or t
agctgctgctgctccacggagcggaacccaactgcgctgaccccaacactctaaccagacccgtgcacgatgcagctcgggagggcttcctggacaccctggtggtgctgcacagggcaggggcgcggctggatgtgcgggacacctggggccgcctgccggtggacctgnnnnnnnnnnnnnnnnnnnnnnnnnnngcagtctatctgcatgctgccactggggactgaacgacccgcaagtcttccaaaactccaagcctatgcaggaaggtaaagccaatgagaaataacttccgaagtgttttcctgcatctgggtctggatctggccctctattctcaccctgaagccaaagggatccccaatttgatttagtattgtgtgacgttctgggagccccttccttttcaggtgtaaaataacaagggaagttcttgaatctccacaacatgatggtgcagtgggaattggagaatgtgcttggtgactgacaatagggagggagcagtcagtacctccctccccctgtgacctccaaatgcagataatccacagtctagaaggaaaccctggagactag

SEQ ID NO: 4469 - DNA, 1311 bp, Cricetulus griseus
tgccagagcgcgtgggtccttgggtcaggtcaaagggtcgaaggtgcagcgcgtgacccaggatcctagcaggctcggagcaggagcatggcgtcgtcggggtcggtgcagcagccgcggctggtgctgctgatgctggtgctggctggcgcggcgcgggccagcctctacttccgtccgggccggacctgctaccacccccttcgcggggaccagattgcccagctggggcgcaggacttaccctcggccgcatgagtacctgtccccatcggatatccccaagaactgggattggagaaacgtgaagggtgtcaactacgccagcatcaccaggaaccagcacatcccacagtactgcggctcctgctgggctcacggcagcaccagtgccatggcagaccgcatcaacatcaagaggaaaggtgcgtggccctccaccctgctttccgtccagaacgtcatcgactgtggcaatgctggctcctgcgagggaggcaatgaccttccggtgtgggcatacgcccataagcatggtatccctgacgagacctgcaacaactaccaggccaaggaccaagactgtgacaagtttaaccagtgtgggacctgcaccgaattcaaagtgtgccacaccatccagaactacacccgctggagagtgggtgactacggctccctgtcgggtcgggagaagatgatggcagagatatacgccaatggtcccatcagctgcgggataatggtgaccgagaagatggataactacacaggaggcatctatgccgagctccaggagcagacctctatcaaccacatcgtctctgtggctggctggggtgtcagcagtgatggcattgagtactggattgtccgtaactcatggggtgaaccctggggtgagaggggctggatgaggatcgtgaccagcacctacaaaggaggcacgggtgccagctacaacctcgccattgaggaggcctgcacatatggggaccccattgtttaagtacacgtctctggaaacaatgttgtaaaccatgccagggatggatggggtgattaacactggacagctagaaacagtgcttgtggacatgacgaccagtgtggactgcagaagccatcccaagaagagatggtaaaggaggagcccacctccccgttgccctcaggatcagaggcctgccttcagccacctggggaagacagctatggtctacaacagttctgatctcaccctaggatcgatccatgggagagggtaacaattccaggatgcctaagtgatgaataaagtatccggattccc

SEQ ID NO: 4470 - DNA, 226 bp, Mesocricetus auratus; identical to SEQ ID NO: 828

SEQ ID NO: 4471 - DNA, 437 bp, Mesocricetus auratus; identical to SEQ ID NO: 829
  misc_feature (267)..(319): n is a, c, g, or t

SEQ ID NO: 4472 - DNA, 419 bp, Mesocricetus auratus; identical to SEQ ID NO: 830

SEQ ID NO: 4473 - DNA, 600 bp, Mesocricetus auratus
gtgcacgagtggcttcaccacaaagacaggaacctgggatttaagataagtttgcactgcccctgttgcaccttcgtgccatttaataataacatcatcccgaataaaagcgaagagctcgaagccagattcgcgggtattgatggcacctcccaacatagcagtggtcatcaggagactataaagtccactaggaagaaaaacagtgggaagacccctcatctcctgctaatgctgctgccctcctacagactggagtcacaacagtccaatcggcggaagaagcgtgctttggatgctgcctattgctttagaaatgtgcaggataattgctgcctccgccctctttacattgatttcaagagggatcttgggtggaaatggatccatgaacccaaagggtataatgccaacttctgtgctggggcatgcccgtatctgtggagttcagacactcagcacaccaaggtcctcagtttgtacaataccataaatccggaagcttctgcttctccttgctgtgtgtcccacgatctggagcctctcaccatcctctactacattggcaacacacccaagatcgaacaactttccaacatg

SEQ ID NO: 4474 - DNA, 600 bp, Mesocricetus auratus
agagtctgaggccatcaagagtttattgaaagcagttagccaaagaaggtctaaaagagcctcttaaccagagagaagccgatcaccgcagtgctgtagccgacggacaggcagcggaaagcccgtctctccatcacttctttatacgtcggcctatggctactcctaattgtccctggttcccctgaaaggtgaccagccatggtcacatcagctgctatccctagtgacatcaggtcactattctccaggacgatgggcagctcctcgtcctgagacaacagtaactccagtgacaagagtccccaactctactaagagctggtcctgagttctcatacagacagctgcaatgtttctcctggcgctgtactatataagctacgctgaggtgctacacttttagccttgtgccaagctctacctgctcctcaccctccccaccttaaagtgtgttagcagatctgtccagttctgagttacctgggttctttaatttcaaatacagtcgcaataagactaccacctgcctgctcctacggacaaactttacttcatggcttacagctaccttcccaaggaaacttcataactcagagt

SEQ ID NO: 4475 - DNA, 600 bp, Mesocricetus auratus
  misc_feature (352)..(366): n is a, c, g, or t
gtatgtgtgaatcctcaagccaaatggctccaaatagtgttaaaacttttacggagcaaaactatgtcttcaacggtcacagcgccagtgagtaagagaaggactacctctacctaaaggccctatccaccaaaggacacctgcaccctcctttattccctgctctgaattctagctgtgctcttagttgaagaatttccaagaaaataacttccttttgcaaacaaacatgactgtctgtaaggaaagccctgcaggagctgaaagggttaacccgagctcctttgcatactcaacctccattcttgtccaaggatgggagtttagttacaacccacttggcctgtgtttnnnnnnnnnnnnnnnctttaatgttaaaccgtcctaagttgtagaggaatggaaactcacatgtaaaacgtgaacctgtaccttgtattaacaagaaatatatggggtgtacatccatcgtttcacatgcttaggaaaagcagctttccagaagtttcctgggcagctgatgcagttccaacctaacacgatgcagagtgaaaagccccatgaagaaaatagagtcctacttttaaaggtttcttgtgt

SEQ ID NO: 4476 - DNA, 321 bp, Cricetulus griseus; identical to SEQ ID NO: 834
  misc_feature (201)..(201): n is a, c, g, or t

SEQ ID NO: 4477 - DNA, 561 bp, Cricetulus griseus; identical to SEQ ID NO: 835

SEQ ID NO: 4478 - DNA, 305 bp, Cricetulus griseus; identical to SEQ ID NO: 836

SEQ ID NO: 4479 - DNA, 600 bp, Cricetulus griseus
aaagacagccccaatgtgtttctgttcaaactgggtggggtcacggcctccttcacagcttctgtgggcagcctgttcctcacagccatcgacaggtacatatccattcacaggcctctggcctataagaggatcgtcaccaggcccaaggctgtagtggccttttgcctgatgtggactattgcaatagtaattgctgtgctgcctctccttggctggaactgcaagaagctacaatctgtttgctcggacattttcccactcatcgatgaaacctacctgatgttctggattggagtcaccagcgtgctgttgctgttcattgtgtatgcatacatgtacattctctggaaggctcacagccatgcagtccgcatgattcaacgtggaacccagaagagcatcataatccacacatcagaagatggcaaggtgcaggtgactcggccggaccaagctcgaatggacattaggctggccaaaaccctcgtcctgatcctggtggtgttgatcatctgctggggccctctgcttgcaatcatggtatatgatgtctttggaaagatgaataagctcatcaagacagtgtttgccttctgt

SEQ ID NO: 4480 - DNA, 298 bp, Cricetulus griseus; identical to SEQ ID NO: 838
  misc_feature (122)..(140): n is a, c, g, or t

SEQ ID NO: 4481 - DNA, 600 bp, Cricetulus griseus
gaacccaaacccaattctgaactgtgttgcaagccattgtgtcttatgctggcagatgagtccgatcacgagaccctgactgctatcctaagccccctcattgctgaaagggaagccatgaagagcagtgaattaatgcttgagatgggaggcatcctcaggactttcaagttcatcttcaggggcactggatatgatgaaaaacttgtccgggaagtagaaggcttggaagcctctggctcagtctacatctgtacactttgtgatgccactcgtctggaagcctctcaaaatcttgtcttccactccataaccagaagccatgctgagaacctggagcgctatgaggtttggcggtccaatccctatcacgagtcagtggaagaactccgggatcgggtgaaaggggtctctgccaaacctttcatcgaaacagtcccttccatagatgcactccactgtgatattggcaatgcggctgaattctataagattttccagctggagataggggaagtgtataaaaatcccaatgcctctaaagaggaaaggaagagatggcaggccacactggataaacatctccggaaaaggatgaac

SEQ ID NO: 4482 - DNA, 444 bp, Cricetulus griseus; identical to SEQ ID NO: 840

SEQ ID NO: 4483 - DNA, 426 bp, Cricetulus griseus; identical to SEQ ID NO: 841

SEQ ID NO: 4484 - DNA, 204 bp, Cricetulus griseus; identical to SEQ ID NO: 842

SEQ ID NO: 4485 - DNA, 97 bp, Phodopus sungorus; identical to SEQ ID NO: 843

SEQ ID NO: 4486 - DNA, 110 bp, Mesocricetus auratus; identical to SEQ ID NO: 844

SEQ ID NO: 4487 - DNA, 121 bp, Cricetulus griseus; identical to SEQ ID NO: 845
  misc_feature (95)..(96): n is a, c, g, or t

SEQ ID NO: 4488 - DNA, 459 bp, Mesocricetus auratus; identical to SEQ ID NO: 846
  misc_feature (87)..(113): n is a, c, g, or t

SEQ ID NO: 4489 - DNA, 600 bp, Cricetulus longicaudatus
ggctgcttagaatttccttatggtgtccttgctgcttctgccttgtatcatttctcctccatggaactgatgcagaaggtttcagggtatcagtggtgcgacatagagaaatgtgtcaagtggatggttccgttcgccatggccttccgggaggtgggaagctccaagctcaagcacttccggggagttcccatggaaaacgcccacaacatccagacccacgccaacagcttggatttgctggacaaagcccaggcaaagaaagccatattgtcagaacagaacaggatccctcctcctcccagtggggtcctgacacccccacccagcagtaagaagcagaacagtgaggaggagacagaatgagcaaacctgccaaagacagtgttgtggaagcagctgcctggagctcctttgctgcctaggaggttgggagcccctgctgatgctctgcggaaaggcgtatctcttccagagcagcgggcgtcttcaaaatggcctcggacagaagtgcttgtatggaatgctagttgttttaacaatagggttgaggacaccagccacctccagaacgccgctgagtgctccagaagctgctaa

SEQ ID NO: 4490 - DNA, 190 bp, Mesocricetus auratus; identical to SEQ ID NO: 848

SEQ ID NO: 4491 - DNA, 241 bp, Mesocricetus auratus; identical to SEQ ID NO: 849

SEQ ID NO: 4492 - DNA, 221 bp, Mesocricetus auratus; identical to SEQ ID NO: 850

SEQ ID NO: 4493 - DNA, 205 bp, Mesocricetus auratus; identical to SEQ ID NO: 851

SEQ ID NO: 4494 - DNA, 142 bp, Mesocricetus auratus; identical to SEQ ID NO: 852

SEQ ID NO: 4495 - DNA, 134 bp, Mesocricetus auratus
actgaggacaaaggcaaaatgtctagaagatgagcgcttaaggactgaagatgagttgtcaaaatacagggaaattatcaatcgtcagaaagctgagattcagaatttactggacagagtgaaagtggcagatc

SEQ ID NO: 4496 - DNA, 212 bp, Mesocricetus auratus; identical to SEQ ID NO: 854

SEQ ID NO: 4497 - DNA, 600 bp, Mesocricetus auratus
cttctttccagaatatacggagctgtgcgaaccccagggctactgtcctatgcaccaccaggaccaccaggctgagctgctgatgtggcgaaaccagagcaaagcccaggaaggggagcggcagctttcggagcagattgccctcctgatgaagaagggtgtgagcctcccatagtgggtggtggtggcgcacacctttaaccccagcacccgggaggcagaggtaggaggatctctgcgtttgaaatcagcctgtctacgacacagcaagttccaggacagccagagctacaaggaaaacatctcagaaaaacaaaaaacaatttctgtcaagtatggagcagatgcctgttgcctgtgtgcttgaaaggtggacctagaggacctgaagctcagttcaaggccagcctcagctcctggattccctagctcactaaatggaaacaaaaccgaaaggcatagtaaccattgctctggaaccaagggaaagtttcatttgtattcttgaactggtgttggtggtaaatgtttgtattcctaagaggtcatggcaggaagatgatgagttaaagaacaagataaagtctgtggtgcggccgc

SEQ ID NO: 4498 - DNA, 1400 bp, Mesocricetus auratus
  misc_feature (374)..(398): n is a, c, g, or t
  misc_feature (558)..(600): n is a, c, g, or t
  misc_feature (629)..(646): n is a, c, g, or t
  misc_feature (1078)..(1115): n is a, c, g, or t
tagaattcactgtgtcaccaggggagaaggtggacatgactcctatctatgggctgactttaaagcacgcccgctgcgaatacttccaagcgcagacacggtcctctgggcctcagcatccacaagcttagactgccctgtgtggtcaccagagcagggggctgttccagggatttaacttcactcagaaacacagactctgggcttgtgcttgcctcctgatttggtcttgcttctccgcatgctgatcacagacactgggcacagcagagacccactggaacatcagagtcttcccaagttcaccagcaactaggggggcctgaaagggaaaggaggtccctgggcctcagaaaactcctgcagagtccccnnnnnnnnnnnnnnnnnnnnnnnnngaaaaatgcttagagcatggtcatgccaggatctgtcaggcttagaggagctgtccagaatagagggagaagacatcttaaaatactgccacaggcctgtccacgtttgccaggcattggtggtgcacacctttaattccagcactggggaagcagacgnnnnnnnnnnnnnnnnnnnnnnnnnnnnnnnnnnnnnnnnnnncgagttccagaacagcctccaaaacaatnnnnnnnnnnnnnnnnnncaaaaaccaaaataaacatgctgccacagaagtgcttctgccatttactagggctggacagctttcccacatgggtctaggacgatgtctgtggtgatcacctttatttgtccagggtactcctgtccttgcaaaagcccccgttcctgctctggaagtgctgtgtcttgtgtctaggaagatccaagaacagagggacagactttctgggcagtaggaccaggtcaagagtaaagggatgactcttgagacaagagtcttgtgcagctcagattgcctctgagcctgctgtgtattgatcgtgaattacttacttttttaatgcttttactgacataccaagtgctaggatacagtcattggtctctcttctttactgtataaaatgttcatttaaaaaatgtttgtaccagctgggcggtggagatgcgnnnnnnnnnnnnnnnnnnnnnnnnnnnnnnnnnnnnnncgatttctctgagttcgagaccagcctggcctacaagaactagttctaggacaggcctccaaagccacagaaaaaccctgacttgaaaactccccccccccaccgcaaaaaataaatgtttgtacctaagaccttttattttggcccatattttgcttatgcatttgtattagtcatatcttaagagtttagatcaatgcatttactattacagagaaaaccctaactcaagtatccagaaatatataggaactacctacctgagctaaataaaatattacctgg

SEQ ID NO: 4499 - DNA, 600 bp, Mesocricetus auratus
ggtcctacctgttcctcttgcagaaagcagtggaaagacccctttgtgttccgtccagagcggtttcttactgataatgacacagtcatcaacaagactctgagtgagaaggtgatgctctttggcttgggaaagcgcaggtgcattggggagatcccggccaagtgggaagtcttcctcttcttagccatcctgctgcagcagctggagttcagcgtgccaccgggcacaaaggtggacctgacacctacctacgggctgaccatgaaacctcagacctgcaaatacatccaggcgtggccacgtttttccaaatgaagatggctgaggcaggggaggaggcatccatggggctgtcacctctgtttctttccctttctttttaaataacagcttttttttggagtacaattctttcaccaaataattcacctccaatcaaatagaatattgtctgtcatatacccccaaacctatacccattaagatttatgactattcatcctaacctgtctcccttgctccaccagatgctaatgtagtttttgactcgataaatttgcctactctagtcccatcacataaactcaatgatctatg

SEQ ID NO: 4500 - DNA, 600 bp, Mesocricetus auratus
gacagcgaaggtccagaaagagatcgatcatgtgattggcagagacaggagtccctgcatgcaggacaggacccgaatgccctacacagatgcaatggtgcatgaggttcagagatacgttaacctcatccccaacaatgtgccccatgcagctacctgtaatgttaaattcagaaattatgtaattcccaagggcacggacttaataacatcattgacttctgtgctacatgatgacaaagaatttcccaaccccaaaatatttgaccctgcccattttctggatgagaatggaaactttaagaagagtgactactttatgcctttctcaataggaaagcggatgtgcatgggagaggccctggctcgcatggagctgtttctgcttctgaccaccattttacagaattttgatctgaaatctttggctgatacgaaggacattgacactaccccagtggccagtacttttggctgtgttccaccttcataccagctgtacttcattcctcgctaaagaacagactggcggttgctatgcaggtgtatgtgatatggtccatgcccttcccactattagggatacctctctcatatctc

SEQ ID NO: 4501 - DNA, 567 bp, Mesocricetus auratus; identical to SEQ ID NO: 859
  misc_feature (173)..(191): n is a, c, g, or t

SEQ ID NO: 4502 - DNA, 404 bp, Mesocricetus auratus; identical to SEQ ID NO: 860

SEQ ID NO: 4503 - DNA, 1400 bp, Mesocricetus auratus
  misc_feature (1254)..(1271): n is a, c, g, or t
acctcagagcagcacagcatacccaacagtcaataagggaaaagtacaaacattcaaaataccatggtgtttctcttctcaacccaccagagacactaaatgtgtaagaatgaaagactacctttgtttaaaatgggagtcactcagaggtcacaatgtacagtttttgtcttgggttttaatttcacaaatcatttcacaaagtagatggtatagccacagacaaattatggtatccattgcttttttaaatggtttttaatttgtatatctttttgtacatgtgtctatcttagatatttggctaattttaattggtttgttaacatatcgagaaaccaaatatcaagacaaaaaaaacaaaggaaccacgaaatctagacaagtcaaagttaatttgagataatgactgataatgtcacttagaaaggctaacttgggtttattgttcagtgggggtagaaagagcttcctaaaggaaatatttcagggaaactgacattgattattctaagcaactgaaccaaattgctgacttggtcatgaaataagcaaaactagactctcagggttgcagagattcccagacacattgagctctactatttatcaactttttcaaataaaattttacatggaaggaagattttgtgcaacagaaaagttgtaaagaaagtttatccaaagcataattttaaagacaaaacaatttatgaaacagtcagcccttataatggattttcaaataaaaaatacccagggctgttaaagcactgaataaatatccttttagtagtttatatacaaaacatcactttagctttaattagcagttctcttctttctcctccttttcacttggcttctacttggtgccttttcttttgcactggtggtctgagctctgaaaataaagtaatgaatgccacaactcagtgtatgtgcactgaatcctggaccggattgctagaactctgaaggcatcctgttttatagacatagacagatttttatgtatatttgaaagtaaccagaaatctgttaccttattttctttggagtcttgtctggttccaaaatgatcatttcttcttcttcgctatctgacagcactataggggcacctttaagaaaatacccaaaacttatcaatatcattagtcctagtgctcaagccttcccttcttgcctggaggcagcatatacaacatactctttccaaaaattttgtaaaaaagtcatgttttctgtagnnnnnnnnnnnnnnnnnnaaaagagaactcatgtaggccaagacggtctagtttattactaccagggctaaccatgaaaaatgtagaaaacttttgtttgcccatattaattatatatatgtaaataaagcatgcaaattaatcatt

SEQ ID NO: 4504 - DNA, 797 bp, Mesocricetus auratus
aaccggagaggagtgagcagagacagcgagcatcagatcgtgccccgacccacaccggcatgggctccttctccatcaccgtgggcttcttcctcctcctggccttttggcttccgggccatattggagcgaaccctgtgtacagtgcagtgtccaacacagatctgatggatttcaagaacctgctggaccatctggaggagaagatgccgttagaagatgaggtcgtgcccccacaggccctgagtgagcagaatgatgaagcgccaggggcagcgctcagctctctccctgaggtggctccctggactggagaggtcaacccacctcagagagatggcggtaccctggggcgcagcccctgggacccctccgatagatctgctctcttgaaaagcaaactgagggctctgctagctgcccctcggagcctacggaggtccagctgcttcgggggtaggatcgacaggattggagcccagagcggactaggatgtaatagcttccggtaccgaagataacagccagggaggaaaggcagccagattcgctgggggcagattgcagaagaccccaagccccgtggtgtgtcacgcagcttggtctcattgtcactgaggtgtggcgaacaccctgctggagctgctgcttcctgtcttcatctatcacgacccatgctacatgtagatgagtggttttggggggctctccctctccagccctgcatattaaagtagatcctcacccctttcagaaagcagttggaaaaatttttttgaataaacttcagcaccaag

SEQ ID NO: 4505 - DNA, 600 bp, Mesocricetus auratus
agaaagggaagtgggagagagaaaagaggctcagatacaaagagaggacagaagagtagagggatacaggaaaagtcctgtctgccccaggggaacagtaggaaagagagaggggaaagggagacaggaaagagagcataagtggatggaagtctttcttttaaagggttcctttgcacctgggctgaccagggtactgactgcattctgccaggtgacaagggcaggccagcataatgcctgaatccttacagatcctggttatctgcctatctcaagaccctgaatttaaatatatattcaaagttctctgatgggggatgtctttctgtatatatgtttctcttattggttgaataataaaacactgattggccagtagccaggcagaaagtataggaggcactaccagatcaggataattctgggaggaggaaggcaaagagaagccaccagagaagatgccatgtagtggttgggaatataggacactgaagcattctccacgtggaaatacatagattaatacttatgggtaaataattaagacagagctagccagtaagaagcctgagctattggccaaacagtttaataatt

SEQ ID NO: 4506 - DNA, 429 bp, Mesocricetus auratus
gtgagggagacctacgacttcgacatcgccgtgctcaggctgaagacccccatcatattccgcatgaacgtggcccctgcctgcctgcctgagaaggactgggccgaggccacactgatgacgcaaaagtcaggcatcgtgagcgggtttggacgcacgcatgagaagggccgccagtcacacatcttgaagaagctggaggtgccctatgtcgaccgcaacacctgcaaactctccaccagcttcaccatcacgcaaaatatgttctgcgctggctatgacgccaagccggaggacgcctgccagggggacagtggcggcccccacgtcacccggttcaaggacacctactttgtgactggcattgtcagctggggagaggggtgtgcgaggaagggcaagtatgggatctatacgaaagtcacggcc

SEQ ID NO: 4507 - DNA, 469 bp, Mesocricetus auratus; identical to SEQ ID NO: 865

SEQ ID NO: 4508 - DNA, 600 bp, Mesocricetus auratus
  misc_feature (520)..(547): n is a, c, g, or t
gctaacacaggaaggtgaagatggagatggtgatcttgcagatgaagaggaaggaactgtacaacagcctcaagccagtgtcctgtatgaggatttgcttatgtctgaaggagaagatgatgaggaagatgctgggagtgatgaagaaggagataaccctttttctgctattcagctaagtgaaagtggaagtgactctgatgtgggatctggcagtataagacccaaacagccccgtgtgcttcaagagaatacgaggatgggcatggaaaatgaagaaagcatgatgtcctatgagggagatggtggggaggtttcccgtggtttggaggatagcaacatcagttatgggagctatgaggaacctgatcccaagtcgaacacccaggatacaagcttcagcagcatcggtgggtatgaggtatcagaggaggaagaagatgaggaagagcagcgttctgggcccagcgtactaagccaggtccacctgtctgaggacgaggaggacagtgaggatttnnnnnnnnnnnnnnnnnnnnnnnnnnnngactctgatgaatgaggcttcctttaagcctcttcagtaagccgacagcaacg

SEQ ID NO: 4509 - DNA, 1393 bp, Mesocricetus auratus
gctactgaggatatagttattgtctctatccagtatcgcttgggtatccttggcttcttcagcactggagacgagcatgccagaggaaattggggttacctggaccaagtggctgccctacactgggttcagcagaatattgcctcctttggaggcaatcctggccaggtcactatttttggagtgtcagcaggtggcacaagtgtgtcctcacttgtcgtgtcccccatgtccaaaggactcttccatggagccattatgcagagtggagtggctctgctgcctgaccttatctctgacacacctgaggcggtctatacaccagtggtggccaaccaatctggatgtgaggccaaggattcagaggccctggtacactgccttcgagagaagactgaagcagaaattctggctatcaaccaggtcttcattatgacccctggtgtggtagatgggattttcctacctcggcaccctcaggagctgttggcctctgtggatttccaccctgtccccagcatcattggtgtagacagtgacgagtgtggctggggagtccccttgttcatgggccttgatcatgtcataaagaacataaccagagagaccctgccagcttttctgaagagcagagcagaacacatgatgctgcctcctgaatgtagtgacctgctaatgcaagaatacatgggggatgttgaggacccccagaccctccaagcacaattcagagagttgatgaaggacttcatgtttgtgatccctgcactaaaagtagcatattttcagcgttctcatgctcctgtctacttctatgagttccagcaccagtccagcttcatcaagaataaggatgccaggccatcccatgttagggctgaccatggtgatcatgttgcctttgtgtttggctctgacttctggggcttaaaaattgacctcactgaggaggagaagctgctgaacaagaggatgatgaagtactgggccaactttgcaagacatgggaaccccaacagtgagggtctaccctactggcctgagttggtccacgatgaccagtacttgaagctggatattcagcctgctgtgggccgggccctgaagtctagaaagctgcatttttggacgaagattcttccacagaagatccaggagctaaagggggctcagggcaagcattcagagctttagtgacctctgacagtacagatgcacagggtgagggcagatggagtaatcctgagattacaaaatccagttaattatttttatgtactccaacactcacattagcctttctaaccctcagtacttgcccttttagaaatgtatgacaatccttctatgtggtactaatccttctggatccattttattagatttaataaac

SEQ ID NO: 4510 - DNA, 600 bp, Mesocricetus auratus
cagctgcaaaatattgtatccacggtgaatcttggatgtaaacttgacctaaagaccattgcacttcgtgcccgaaatgctgaatataatcccaagcggtttgctgctgtcatcatgagaataagagagcctcggacaactgcgctgattttcagttctgggaaaatggtgtgcacaggagccaagagtgaagaacaatccaggttagcagcaagaaaatacgctagagttgtgcaaaagttgggctttccagcaaagttcttagacttcaagatccagaacatggtggggagctgtgatgtgaagttccccataaggctggaaggccttgtgctgacccaccagcagttcagcagctatgagccagagttatttcctggcttaatctacagaatgatcaaacccaggattgttctccttatttttgtttctggaaaagttgtattaacaggtgctaaagttagagcagagatttatgaagcatttgaaaacatctaccccatcttaaagggattcaggaagaccacatagtggctgccatgtcctgcctcccctacacacttgttttttaaagccagtcagttttggtaccactgatgg

SEQ ID NO: 4511 - DNA, 1234 bp, Mesocricetus auratus; identical to SEQ ID NO: 869
  misc_feature (876)..(891): n is a, c, g, or t

SEQ ID NO: 4512 - DNA, 1400 bp, Cricetulus sp.
  misc_feature (174)..(221): n is a, c, g, or t
  misc_feature (831)..(890): n is a, c, g, or t
  misc_feature (1175)..(1194): n is a, c, g, or t
catctcagcctccgggatgagcgtccctgtccgcacgcggagctcggcccccaggccctgccctcgcgttctgcaccccgggaggtccccatcaccggcagcaccttgccctcggggccgctgcacgggcctggagaggaggtcttggaaagttactgctagaggcggagccannnnnnnnnnnnnnnnnnnnnnnnnnnnnnnnnnnnnnnnnnnnnnnnaggatgccctgcgaacgggaaagatggagaagggcctccgagcctcgcctggggacagcaggggcctgcagatggagagatgggcagggtgtggaaactgggcttccagcccaggtgcactgaaaatttcttctcattttgtgtacgactgttctgcccgcatggacgtatgtgcgcctcgtgcccgaaggaaggccttccctatgcctgaagggcagaagatcccctggggctggaactccgtgtctgcagcccggagtgcagcagaggtgtctgtgtcctcctgctccacaaggacggattatgagggggcaggttgtgaacgggaagcccggtgtgaggaatgcaggcggctggaccaggagggagaccacagagcggtgatggatttgctgagggatgccgggagagggatcaaaggagactgctgtgacaaacacggagatcagagggctcttggtttggggtgggagtgcaccgaacgaagttaggctgtgggagcagggtactgagggttaaataagagcaggcttctgccgaaccctgctgaatccaggcagccagccgcactgctggcagttaggacacacccttccaccccccagagagnnnnnnnnnnnnnnnnnnnnnnnnnnnnnnnnnnnnnnnnnnnnnnnnnnnnnnnnnnnncctcctcagctggtagggggtgctggactttccccagagagccctgccccggagccgacactgcactccgcacctcgggctttggcttccggtgcagctggaggccctggtaaatcaagcctgaggatcagtagcttctttatggggtgggagacgcagctggaaagggaggtgactagggagagtgtgatgagtaggggtcagctgaagccacaaggaagcatgaacatcacactgccactgtgccctaaggggatcttgattggaaactatttaagacacacnnnnnnnnnnnnnnnnnnnnttaacgttgtgtgtatgagcctgctgcccctctagaaaggtcacaccgaaagtgtaaagctgggacacctatgatcagtctgggcacttggtggcgcgcgcgggggggggggggtgacgttgagttgaaggtcatcttgacagaaagcaagttgaatatttaaactttgtgacaccttatctcaaataaacagtaaaagtagcagg

SEQ ID NO: 4513 - DNA, 600 bp, Mesocricetus auratus
accgaggacacagagtttgagggaggctctagaccttcaagttataggccaagtagctcaggctctgggaaccccatgcctagcaaccctgactggggcgagttttcagagttcacaggaagtagcagcccggcaataaagaaagagtaccacactggaaaactgaccacctctaaaggagataaagagctcgtgatcggaaacgagaaagccacctccactagcaccagcacaagcacgacacgtcgttcatgctctaaaaccattaccaagactgtgataggtcccgatggtcaccgagaagtggtcaaggaagtggtcacctccgatgatggctccgattgtggtggcaccggagacttaggcatgacccacggttttggtggcaggtttgatgaatttgcccacaggttccccgaccaagctgccttttttgatagtcacttcgattctctctcgtctaactacaaagaagttggcagtaagacccacactgcaggctctgattcggacatcttcacagacttaacagacccgggctcccatgtgcctgagtacccttccagtagcaaaacctcaactgtcagaaaacaagtcacc

SEQ ID NO: 4514 - DNA, 600 bp, Mesocricetus auratus
attcccctgtgggttagcacttgacatgtagaggcttgcccttgaatgtggagtccaccttcatcagcatcactctcagagactgaccttgaacaatacagcaggggaaggaaacaagtggaacctggccaccttgaaagcagcccaggaagggggtgggtatgccatgtatcccacagaggctgggggtaggtacatgacacaaactcagtaattaatttcatagcattgcccccaagcactggattttttttctctccaggacccaagttttaggcggtgagtaatgcttgcaagcaagttactgaagaacttagaaatggacagccaatgtgttcagccactcaggcccataccccctgaggcctctagtgtattgtatcatatttctctgtggaaaatgtcatgtttagtcaagttggagccctctcgcctggcccctttgttttccctatcctttctcccaagcacccattgatttctcttctgagaacagtactaccccattcatctattgtagagtaatccctgtgactcaatattaccatagtgcgatgttgttttgtgctattttgaacaattaaaagacttttttgaaat

SEQ ID NO: 4515 - DNA, 600 bp, Mesocricetus auratus
ttagcactctgtccagctgggtgctgctgatggattacctgggcaacgccactgccatcttcatcctacctgatgatggcaagatgcagcatctggagcaaactctcaacaaggaaatcattggcaagttcctgaaggacagacacacaaggtcagccaatgtacacttccccaaactgtccatctctggaacctataacttgaagacagccctggatccgctgggcatcacccaggtcttcagcaatggggccgacctttctgggatcacagaggatgttcccctgaagcttggcaaggctgtgcataaggctgtgctgaccatcgatgagagagggacggaagctgcaggggccacatttatggaaatcatccccatgtctgtgccccctgaggtgaactttaacagccctttcattgccataatatatgatagacagacagcaaagagccccctctttgtgggaaaagtggtggatcccacacgttaatcacaattctcagtcagatgtcatcttttctggattgggtcccctccccagtgacattaaacacaggctgtcctggcccacccatgcctgagtgcttctgcaaatgctc

SEQ ID NO: 4516 - DNA, 1400 bp, Mesocricetus auratus
  misc_feature (219)..(249): n is a, c, g, or t
tgaaggctctaacctgccggtgatggtgtggatccatggtggtgctctggttgtaggaatggcttctatgtatgatggttccatgctggcagccattgaggatgtggtggttgtcactatccagtaccgtctgggtgtcctcggctttttcagcactggagatgagcacgccagaggcaactggggctacctggaccaagtggctgccctacgctgggnnnnnnnnnnnnnnnnnnnnnnnnnnnnnnnccccggccaggtcactatttttggagagtcagcaggtggcacaagtgtgtcttcacatgttgtgtcccccatgtccaaaggactcttccatggtgccatcatggagagtggagtatcagtgatgcctggtatcatctccagctcctctgagatggtttacacaatagtggccaatctatctgattgtgcagctgtgaacacagagactctggtgagctgcctacgaggcaagagtgaagcagagattctggctattaacaaggtcttcaagatcattcctgctgtggtggacggggagtttctaccaaagcatcctcaggagctgttggcctctgctgattttgaccctgttcccagcatcattggtgtcaacaatgatgagtatggatggcttgtgcctgtgatcatgggctctgctcaggaaataaaagaaataaccagagtgaccctgcctgcaattctgaagagcacagcaaatcagatgaagttgcctcctgagtgtggtgacttgctaatggaagagtatatgggggacaatgaggacccacagaccctccaagcacagttcagagagatgatgggggacttcacgtttgtgatcccttcactccaagtagcacattttcagcgtgcccatgctcctgtctacttctatgagttccaacatcggcccagcttctttaaagataccaaaccaccacatgtgaaggctgaccatggtgatgaatttttcttcgtctttggcaacctattatgtggcataaaatttgcttccactgaggaagaggaactcctgagcagaaagatgatgaagtactgggccaactttgcacggcatgggaaccccaacagtgagaatctaccctactggcccatgttggaccacgatgaacaatacctgcagctggacattaagcctgctgtgggacgagccctaaaggccagaaggctgcagttctggaccaaaattctgccccagaagatccaggagctaaagggcactcaagagaggcaccaagagttgtagtaccctgtttgaagaaaggcatgtggccttcatgaagggtgggttctgtctgaagtttggaaagacttttgatcctaacatgcatataagaattaataaaggatatggccatgcatttttaaaa

SEQ ID NO: 4517 - DNA, 1400 bp, Mesocricetus auratus
ggccctctctgcccacgaaaatgtggtagtggtgaccattcagtaccgccttggcatttggggattcttcagcacaggggatgaacacagtcgggggaattggggtcatttggaccaggtggctgcattacactgggtccaggataatattgccaactttgggggcaacccaggctccgtgaccatctttggagagtcagcaggaggtttcagtgtctctgttcttgtgttgtctcctctggccaagaacctcttccacagggccatttctgagagtggtgtggccctcacttctgctctgtttacaaaagacgccaagcccattgctgagctggttgctactctttctgggtgtaaaactaccacatcagctgttatggttcattgcttgcgccagaagacagaggaagaactcatggagacctcacaaaaaatgaatctttttaaattggacctacttggaaacccaaaagagacctaccccttcctccctaccatgattgatggagtgttcctgtcaaagagtccagaagagatcctggctgagaagagtttcaacactgtcccctacatggtgggcatcaacaagcaagagtttggctggatcattccaatgattatgggctatccactctctgaaggcaaactggaccagaagacggctaactccctcttgtggcagtcctacccaacagttaaaatccccaagaatctgattccaatggccactgagaagtatttaggagggacggatgaccctgccaaaaagaaagacctgctcctggacttgattgcagatgtgatatttggtgtcccatcagtaatggtgtctcgtggccacagagatgccggggctcccacctacatgtatgagtttgagtatcgtccaagctttgtatcgaacatgagacccaaggaagtcacaggagaccatggcgatgaaatcttctcagtatttggatctccctttttaaaagatggtgcctcagaagaggagatcaacctcagcaagacggtgatgaaattctgggccaactttgctcgcaatgggaaccctaatgggggagggctaccacattggccagagtatgaccagaaggaagggtacatgaagattggtgcctcagtgcaggcagcccacagactgaaagacaaagaagtgattttttggactgaactcagggccaaggaggcagcagagaggacaacacacagagaacatgctgagctctgatcccaagttccagctatgtttgagagcctggagccaagtaagaggtatgccacagatggtcctgcagagacataaggcttattatctttagggccacacaattgtttggtgttttgtacaaatgcattaaagaggatccttgttgcttcaacttgtaaaaataaaa

SEQ ID NO: 4518 - DNA, 600 bp, Cricetulus sp.
  misc_feature (344)..(375): n is a, c, g, or t
ttttagctttagtttgttggttcctgattgtagaggctatcaagtttgtgtcatcagtctatgttaattaccattaggtaataatgatgaagctgtaagggtagttattttcagtgtaaatgggcttaacatttgaaagattagttatatgtgcctgggtatttgattttatgtagttatgtgcactctgtcccttgtgtccagtacagaaaaggatattcagtctggagttaagatgtagatgagctgccgtatccctgcaggcaactgtacttagtcttctacatgacaacaaataatttgtatttttccaaaacaggcttctctatgtaagagccctagcnnnnnnnnnnnnnnnnnnnnnnnnnnnnnnnnctagcctcaagttcacctgcctctgcctccaaagtgcttgtattaaaggcatgtgctgctactacctgccaagaggaacaaattcttaggaaccatctttccagtcctggtaggtgatattacaaatataggctttgttttttctttttttttaatcatgtgaaattgtacatttctgtttgcatatgtattatcctgggcagggatacatagctgtgttagatc

SEQ ID NO: 4519 - DNA, 1400 bp, Cricetulus griseus
  misc_feature (48)..(64): n is a, c, g, or t
  misc_feature (141)..(177): n is a, c, g, or t
atcggggagatcctaggggctgacttggatgtcgtcatgtctctaaannnnnnnnnnnnnnnnnccaacaagaagcacccgttcccctgccccaccacctaccgcacggccctcacctactacctggacatcaccaacccnnnnnnnnnnnnnnnnnnnnnnnnnnnnnnnnnnnnngcctcagagccctctgagcaggagcagctgcacaagatggcgtcatcctcaggcgagggcaaggagctgtacctgagctgggtggtggaggcccggaggcacatcttagccattctccaagactacccctcactgcggccacccatcgaccacctgtgtgagctgctacctcggctgcaggcccgctactactccatcgcctcctcctctaaggtccaccccaactcggtgcacatctgcgctgtggctgtggagtatgaggccaagtctggacgagtgaacaagggcgtggccaccagctggcttcgggccaaggagccagcaggagagaacggccgccgggccctggtgcccatgttcgtgcgcaaatctcagttccgcctccctttcaagtccgtcacacctgtcatcatggtgggtcctggcacagggatcgcccccttcatgggcttcatccaggagcgagcctggcttcgggagcaaggcaaggaggttggagagacactgctatactatggctgccggcgctcggatgaggactacctataccgcgaagagctggcccgctttcacaaggacggggccctcacccagcttaatgtggccttttccagggagcaggcccacaaggtctatgtccagcacctgctgaagagagacagagagcacctgtggaagctcatccacgagggcggggcccacatctacgtctgcggggatgctcgaaacatggccaaagacgtgcagaacaccttctacgacatcgtggccgagtttgggcccatggagcacgcccaggctgtggactatgttaagaagctgatgaccaagggtcgctactccctggacgtgtggagctaggagctgccacccgcccaccttgctccccgtaatcacttccctaactcccttctgccgacctccacctctggtggtcccttgcgtggcctcgacacagggaggccaagggaccgactcctggcctgactgacacccttctgggccgctcggctgagcccaacccactgtaccaggcaggcggcccagtcccagggcacatggcgagaggagccagccacctctggtgatgggtgccttaggccctcggcagctgtacagaggggcttttctctccagagctgaggtgcagccccaccagtgatttttgaatgagtgtaaataattttaaataaccgggcccttggaataaagttgttttctgt

SEQ ID NO: 4520 - DNA, 600 bp, Mesocricetus auratus
tgccccagcctgtcccagcctgcccctgagaggatctcaaagacacaccattctctggtgctctattgttccctgtaatgcacctcaataaagatgtgaccaccagctgccagagactcgctccttgctctaaactgactcagtccctcacccacagccaggtcctctctgagctgagtggagaattgtttagggctactctctggtcaagctaacaatcttgactactgatttcctggcacagggtgcaccactgcggattgctgagcgtgatctaacatacatgggtgtgtactgtaagttttcacatccagagtaattcgcactgccgttttcctgcactgtcctttcttctcctctgtccttgtcctcatctcttctctccacaaaccccatgccctagccagaacatcttttccacatcacagcaaattcccatgtgtagtcagagatggccatggatagcttgtgtccccaacacttgtcccatcgtcaccaccctctcaaaatcgcacctgcgactagaggagagcctgccctcggaagtccctggaaggtgtctgtggctgcagcagccacaacctttcatccctttctaga

SEQ ID NO: 4521 - DNA, 517 bp, Mesocricetus auratus; identical to SEQ ID NO: 879

SEQ ID NO: 4522 - DNA, 293 bp, Mesocricetus auratus; identical to SEQ ID NO: 880

SEQ ID NO: 4523 - DNA, 387 bp, Mesocricetus auratus; identical to SEQ ID NO: 881

SEQ ID NO: 4524 - DNA, 1365 bp, Mesocricetus auratus
atcacaagcacggcatttggtgtgagcgtcgattctctcaacaacccaaaggaccttttgtggaaaggcaggaagctgttaagatttgatttttttgatccattgttcttgtccgtagtactctttccgttcctcatcccaatatatgagaagttaaatgtctccatgttcccaaaggattccataagttttttcagaaaatttgtggacaaaacgaaggaaaatcgcctggattataaccaaaagcaccgagtggatttccttcagctgatgatgaactctcatgacaattccaaagactcccacaaagctctctctgacatggagatcatagcccagtcaattatctttatttttgctggctacgacaccaccagcagcacactttccttcgccctgtatttactggccactcaccctgatgtacagaagaaactgcaggaggagatcgatattgctctgcccaataaggcacgtcccagctatgataaggtgatggagatggagtacctggacatggtgctgaatgaaaccctcagattgtacccaattggtagtagacttgagagagtctgtaaacaagatgtggaaatggatggtgtgtttgttcccaaaggctccatagtgatggtaccagtttttgctcttcactatgacccacagtactggccagagcctgagaaattccgccctgaaaggttcagcaaggagaacaagggcagcattgatccttatatattcctgccctttgggaatggacccaggaactgcattggcatgagatttgctcttatgaacatgaaacttgctctcactaaagtcctacagaatttctccttacagccttgtaaagaaacacagatcccaatgaaattaagccgaaaagcaatgcttcaaccagaaaaacccattattttaaaggttgtgccacgggatgcaatcataactggagcgtgactttccctcaaggacttctcttgtgttccttgagaatgtggtgtctaagaaaattggaaccttgaacttacttcatgaataaaatgcaaatgaagatgaggcttaatcaactgactctgatgcatggttatggattcagtatacccattgagctttctcagtgttaacacagagtaccatctaatgtaaaatgaataagtcagtgacagaatgagaaattcatcttctatggtgctcatgggaccatgtccatgcacatctgattggctccatcaacttcttttgagctcttttgagagtagccatgcctctgcaatttgatcaataataattttaaaagcaaatacgaaccatcatgacaactcttattgtaaaaaatattccacaataaatgtacactaagcatgt

SEQ ID NO: 4525 - DNA, 600 bp, Mesocricetus auratus
ctgaaccccagctctggtgggcctgtgttctcctggagggaccaggccacgccgcagaaagacggggtcctggtgaccatcaacaagaaaaggaacctggtggtgtctgtggaagacggagccacctttgagattgtcctgcacaggacgtggaaggggagtgccgcccaccaggactttctgggcttctatgtgctggatagctcccggatgtcggcccggacgcgggggctgctggggcaattcttctgccccctggattttgaagtatctgacatccgcccaggctctgaccctatgaagttagatgccacgatgcgtgtgaagaatcggcagctggcagtcaccaggggcttacaaagagactacagcaaggaccccagacatggaacagaggtgtcttgctggttcatccacaacaatggagctggactgattgatggagttcacactgactacattgtcccggacatcttctgagccctccagctagtccgcacctgagactgcatctgaggagggagaggagggcatcgaattaaccccaccctcctgagcgtcctggccctttgtgatttcattaaagagaggctgtgtcca

SEQ ID NO: 4526 - DNA, 1360 bp, Mesocricetus auratus
  misc_feature (233)..(260): n is a, c, g, or t
catcactgcgacttcgactaacacggaattggtcttggaaaccttgagccagatggatgacctggaggattttctatcaaaagacaagcatgcagaccctaatttcaccaaaaaactatgggcctatctcacgatcaaccagctgctagcagagagaagtctggctcctacagctgccatcaaaaggaaaatcacaaaaacaatcttgcagatgtctctagaccatcatattnnnnnnnnnnnnnnnnnnnnnnnnnnnnagaatgaagctggggatgagcgcatgctggctgactccccaccacaggaccattcttgctgctcaggtgcgttatattatggcaccaaggttgcctcagcttccatcccatcatgggccagtccatcccccacaccagtgatggccatgcttgcagtaggagcgaaccgacttgagtccactccacctccacatgtgattcgagtggaaaatgacccccacttcatcatttacctaccaaaaagccaaaagaatatctgtttcaatattgactcagaacctggaaaaatccttagcctggtgtctgatccagaatcaggaatcctagtcaatggccagcttattggtgccaaaaaggcagagaatggaaaactaagaacctactttggaaaattgggattttatttccaaaaagaagacatgaaaatagaaatcagcacagagaacatcaccctgatcaacggttcttctacaactagcttgttctggtctgatacagctcaccttgggaatcagagggtgcttatctccgtgaagaaaggaaaatctgtgactctcaccctaaataaggagatgttcttttctgttctgctacatcatgtgtggaagaagcatccagtcaatgtggactttctggggatctaccttcctccaacaaacaagttttcacccagtgcacatggactcttagggcagttcatgaataagccaaatatccacatcttcaatgagagaccaggaaaagatccagaaaaaccagaggcaagcatggaagtgaaaggacataagctgactgttaccagaggcttacagaaggactacaggacagacatagcgtttggaacagacgttccctgctggtttgtgcacaacagtgggaaaggattcatcgacgggcattacaaggattacctcgtacctcagctctatagctttctcaaacggccttagcggtttatggttttggaaattatatgtgtacattttcttcccttgataggttttgcagttattcctgagctctaacaattcaaaacaaatccagatattgcagtggtctaaaaggcctgctaatccacctgaagaaaataaatatttgca

SEQ ID NO: 4527 - DNA, 1400 bp, Mesocricetus auratus
tgcagggcttctacgaggaggtagctaaccctctgctgacgaacgtggaggtggagtatcccgagaacgccatcctggacctcaccaagaacagttacccccacttctacgacggctctgagactgctgtagcagggcgcttggcggacagtgacatgaacaactttaaggcagacgtgaagggccacggggccttgaatgacctgaccttcacggaggaggtagacatgaaggaaatggacgcagcgctgaaggagcagggctacatttttgggaactacattgaacggctctgggcctacctcactatcgagcagttactggagaaacgcaagaacgcccatggggaggagaaagagaacctcacagcccaggccctggagctgtccctcaagtaccattttgtgactcccctgacccccatggtggtgaccaagcctgaggacaatgaggaccagacgtccattgctgacaagcctggggaagacgccccctacgcagccacgtccacggcctacttgaccagccaccagtctcctccaaccccctactattatgtggacggggaccctcacttcatcatccaagtgccaggaaaaaacgacaccatctgcttcaacatcgacgagaaacccggcaccgtgcttcggcttatccaggacccagtcacaggcatcactgtgactggacagatcattggagataagggaagtagcccttactccaggacagggaaaacctattttggcaaactgggcatcacccacgcttggatggacttccggattgaggtgaccacagagaagatcatcctggggactgaagacgaactgagcacgttcagttggctagacacggtcacaatcacacagactgggctgtttgtagcgatcaacagaaagaagaacatggtcgtgtcctttggagatggggttaacttcgtgatcgttctacaccaggtttggaagaaacatccgcttcaccaggacttcctagggttctacgtggtggacagtcaccggatgtcagcacggacacacgggctgctggggcaattcttccgcccctttgactttgaagtgtctgacgtccgcccaggctctgaccccgcaaagccagatgccacaatggtggtgaagaaccatcagctgactgtcacaaggggctcccagagagattacaggaaggatgccagtgtcggcacaaaggtcacctgctggtttgtccacaacaatggggaagggctgattgacggtgtgcacaccgactacatcgtccccagcttgttctgagtgacgggtcaccccgctgcggaagtggaaggcctggatggtccggagcaaggccgcgggaacgggcttgtgggaagggccaggacaataaagccagcttgtaaacca

SEQ ID NO: 4528 - DNA, 390 bp, Cricetinae gen. sp.; identical to SEQ ID NO: 886

SEQ ID NO: 4529 - DNA, 600 bp, Cricetinae gen. sp.
acaaagaagttttaataagggacacccagttctgagcttagaggcagaaaggtagcatttgttcatacccacacatacacatgatacacatgtgcacacatgcattcacacatttccatgtcctatctttagccccaattcatgcctgtttctggtccaggacaatgccagctttagaaggagttgcctctaaactcccactcactagggaaaaaaaatagtggccgcacccacacttcccggcagccccagatatgctgcctactcacctttagaaggcttctcagcgcccaaacaattctccaaaccaaagcttcctgtctcattcttcagctttccattagcaaaatgagttaccaccagtctctgcggaggccttagcttttcatcctcactattcatggggctgaaatccaagaagtgccatcccaaggaactctgacaagttgaagccaagttctaagagaaatactttgcaggtgagtgtctctcctccctgcctggctgctggccaggacagagcagtgagatgatgggaggggccgctggagcgcccactcccacagaacatttattatcttccagacagagttcatctta

SEQ ID NO: 4530 - DNA, 1118 bp, Mesocricetus auratus; identical to SEQ ID NO: 888
  misc_feature (328)..(342): n is a, c, g, or t
  misc_feature (486)..(521): n is a, c, g, or t

SEQ ID NO: 4531 - DNA, 304 bp, Cricetulus sp.; identical to SEQ ID NO: 889

SEQ ID NO: 4532 - DNA, 294 bp, Mesocricetus auratus
  misc_feature (100)..(134): n is a, c, g, or t
tattacataattagaaatctatagaaaacaaagagaatcttcaggaaatgctgcaattttacattgtgttttcattctccatgactttttaacaattcannnnnnnnnnnnnnnnnnnnnnnnnnnnnnnnnnnaatgtcatttcaatggaacaatgatgttgtaagtgtaccttcaacattctaataaaacatttagcacgggattactctttgctgtttcttctgagcatgagtgagtgaaatctgggcatgtggccacatgcaaggtgattatagacaaagtcttaaagtt

SEQ ID NO: 4533 - DNA, 282 bp, Mesocricetus auratus; identical to SEQ ID NO: 891

SEQ ID NO: 4534 - DNA, 525 bp, Mesocricetus auratus
cgcaacgaccgacctggccaatgggcagcccggtttcaagagcaacatgcctctggcacccgggcacttttagggtcccttttctttcccccacacacaccccaggggggaggacaccattgtggggggcgggggcatgggggggagtgtcagccccgggtagacacagggtcgcaagggtacaaggggggaggggggcggggagaggggcagctgcttttctggcaggggcatgggtgccaggtacagcggagagctggctgcgcatgctgagagcctggggacccacccccaacgctggccgggacttaagtctctctcttctctctctctgtatatatataaagagtccctctatacgtatttatctgtgggtacacgtgcgtgtgtctgtgcggtgaacgtgtgggctgcatggatgtgtgttgggggcctgcccacttgcgcgtgctggggcagagcgagtgtgtgccctggcaatgtcaggtttgttgtttgtctcttgacttgtacctctcaagcccc

SEQ ID NO: 4535 - DNA, 562 bp, Mesocricetus auratus
tagtataagaaaattagggggaaaacactcaaagcaaaggaaaagaagactggacgaaagggagaaaggagagagactgaagaaagaagaccataagaccagcattgcagcactcacaatcactaattccctcaaggctgaaactataatgacacgaaagggttgatgatgtctcactgatgctagtctgcagcccctgcaacgtagcctttgttacatgaagtccgctgggaaatagatgttctttctctatgacaatatattttaactgactttctagatgccttaatatttgcatgataagctagttttcttggttagtattcttgttgtttacgcatggagtcactattcctggttatctcaccaacgaaggctaggaggcggcgtcacaggtgctggggacagagccatgagccagccattttgtgagcactctgatttcttaaagttaaaaaaatatatatataatatctcagtagcctttagttatccatacagatttattaaattttggcccttaacccagccttttccagtgtgtaacccagtttgaaatttt

SEQ ID NO: 4536 - DNA, 1400 bp, Mesocricetus auratus
cctacacctggttcaacctgcaggcgcggaagcgcaagtacttcaagaagcacgagaagcggatgtcaaaggatgaggagcgcgcggtgaaggacgagctgctgggcgagaagcctgagatcaagcagaagtgggcatcccggctgctggccaagctgcgcaaagacatccggcctgagttccgagaggacttcgtgctgaccatcaccggcaagaagcccccctgctgcgtgctctccaaccccgaccagaagggcaagatccggcggattgactgcctgcgccaggctgacaaggtgtggcggctggacctggtcatggtgattttgtttaaggggatccccttggaaagtactgacggggagcggctctacaagtcgccccagtgctcgaaccccggcctgtgcgtccagccacatcacattggagtcacaatcaaagaactggacctttatctggcttactttgtccacactccggaatccggacaatcagatagttcaaaccagcaaggagatgcggacatcaaaccactgcccaatggacacttaagtttccaggactgctttgtgacttccggggtctggaatgtgacagagctggtgagagtatcacagactcctgttgcaactgcatcagggcccaacttctcgctggcagacctggaaagccccagttactacaacataaaccaagtgaccctgggacggcggtccatcacctcccctccttccaccagcaccaccaagcgccccaagtccatcgatgacagcgagatggagagcccagttgatgacgtgttctatcctgggacaggccgctccccagcagctggcagcagccagtcgagtggatggcccaatgacgtggatgcaggccctgcttctctaaagaagtcaggaaaactggacttctgcagcgccctctcctctcagggcagctccccacgcatggctttcacccaccacccgctgcctgtgcttgctggagtcagaccagggagcccccgggccacagcatccgccctgcacttcccctccacgtccatcattcagcagtccagcccgtactttacacacccgaccatccgctaccaccaccaccacgggcaggactccctgaaggagtttgtgcagtttgtgtgctctgacggctcgggtcaggccactggacagcattcacaacgacaggcacctcctctgccagccggtttgtcggcatcggaccccgggacggcaactttctgaacatcccacagcagtctcagtcctggttcctctgattaagatcaacaaagaaacaacaaaatataaaaaaaaaaaaggactgttagtaaaaatatatcaaactgtttctttgtaaaattttatgtattgaggatataaataaatatctccttc

SEQ ID NO: 4537 - DNA, 1400 bp, Cricetulus sp.
  misc_feature (865)..(892): n is a, c, g, or t
ttcttcaagcgagcccgcactcgtgccctgtatgaagctaagaggcagaaggctgagatgaagagccagccgtcagagacagaaaggctgaccgacgactactgaggggggccaccccccctgccccggcccacccggtgtgacttctttaagccgacccgctactaccggatcatgcccaagtaccatgcagtgcgtatccgggaggaggagcgctacccgcctccgggaagcaccctacccaccaagaagcactgggtcaccagctggcagattcgggaccgatactactgactccctccctgacatccctcccagcgctccctcctttcctatttatcataaattatgactctgacagtccaagggggccacatacttggctggcaccagcaggctcaggcatgtgcccctcttcagtgcaggcatgttttctggggccctagactcttcttcaagaccttgcagtgtggagcacagcacggccctgcacactggacacacacacagggcctgtgaagataccatggaggatgccatgtccaagcctctatctgtgccaaaaccaagccaaagcgcctctactgggagccacgaggaaaaggtccctgatgcggtgacctctctcttccacaccgatcccccatgagccattgtgcctggacggactttattgtccagaataaaactactgacgacaaggagacaatcagctgcaagtcctggcacccactggagagtagggccacaccagaggggatgttgttgtgacctgtatgctcagacccaaaagcaaagaactaaaaagcaagtccccagaatgagctttatgaatggatctccaaaaccttggctataggtggannnnnnnnnnnnnnnnnnnnnnnnnnnnaaagagaaaccatggacagcctggacagactgtgctggggctgacctggagcatggtggcatccttcagagagcagggtatcaatcctggcccagcagacactgggaggatgcagaggacatccttctgacccgtcctggcctcctcatcctgggcaaggcctggaagaccccacaagaccacgtgggggtgtaatacttgaatgtaaggcaggggagagcccaacccctgccccagctggccagacttactctgctcttttgaccacagagatggtattctgagctacctgtggctttctgagaaacctctccatgcctcacctgctccgctaggaactgcatccccattccagcagtggaggctgattcccgggtcctctccccgtccctacccacaggcaggcccactccccagctctgccccttcacggtactatagcagcttcctaccctgtgccttctttgtgtatgggcttctcactaaaataaataaacggttcccagtt

SEQ ID NO: 4538 - DNA, 597 bp, Cricetulus longicaudatus
  misc_feature (299)..(321): n is a, c, g, or t
cgactgagctgggaggggccgggaagctgggagtctggatggaggacgaagttggaggtgatgggaggtgggtgggcagaccgcagctcctgggcagacaagttcaggaaggacagccgttggggccgttggatactgggagctggcgctccgccctcttccctctcatccccccacccgcgcctcccaccaccgtcggcggcccctgcgcgtgcgcgcgcgcagacaccggttgccaaacattgcatcatccccgccccccgtcatccctccctcgccgcactctccttcgcccgccnnnnnnnnnnnnnnnnnnnnnnngcgcatgactcactcacctcctccgcggagcctcgtgacccaaagccacttccgggtccaagacaacgtagctctccagccagagggcggggcggaggcgggggccgagggggctcctgagtggcggatgtaggggtggggcggagtcagtgccagcgtgccgctttctgattggcaggctcctgggtcccgccccccaaaagaggggacgggcccgcataaaatatcttctctcggcgctgcagaggtcagtagcctgagtctcacacttcggtc

SEQ ID NO: 4539 - DNA, 329 bp, Mesocricetus auratus
tcgaggcttggctgcgatgtggttgggtgtggccgcccccgcccctggctttcccagtttccacttggcttgaacgtactactgcttcagattgcaggaggagatgctccagagagaggaagcggagagcaccctgcagtccttcagacaggtttgtagccagcagcagccccacccacccaaaccactagcagttctaaaagttacttcgcccaggatttaaaaggtgcaaaacttcaagtcttcctgtaaagccccctggtggcagaaagtccacagatggaaaaactccactatttggatcaatccttgcaacatgaagtttttcg

SEQ ID NO: 4540 - DNA, 600 bp, Mesocricetus auratus
caaaatagccacataaaatagaatgaaaaataattagtataaatagataagataaagaatagactttagtaccgccacatcatcttttctctctttaaaacaggatgttgacaatgcctctctggcacgcctcgaccttgaacgtaaagtggaatccttgcaagaagagattgcctttttgaagaaactgcatgatgaagtaagtgatgtcattactttagtaagcgaacaaggctaagctgcacccatattgtccacatctgacccctctctgtctgctttttcctcaggagatccaggagctacaggcccagattcaggagcaacatgtccagattgacgtggatgtttctaagcccgacctcactgctgccctgcgcgatgtccgccagcagtatgaaagtgtggctgccaagaacctccaggaggcggaggaatggtacaagtccaaggtatgaatgagcccaagggaatgataggatagcctcactctcaaacacctacctcaattcatcaataccccccagctctcctcagtagcagacttttgttgttacagtgtccttgtcactctcgatgcttcctgtagtatggcagaca

SEQ ID NO: 4541 - DNA, 250 bp, Mesocricetus auratus; identical to SEQ ID NO: 899

SEQ ID NO: 4542 - DNA, 600 bp, Mesocricetus auratus
caggatgagattcagaacatgaaggaagagatggctcgtcaccttcgtgaataccaagacctgctcaatgtcaagatggctcttgacattgagattgccacctacaggaagctactggaaggcgaggagagcaggtaggaaaggcagacttgtgcatgggaattaagtcatcaacagtctcttcaggtgcatctcatttaaccttgagactgtttccacaaggtatctgccctttccatagatgggaaacttaaggttgaaaaagaataactgtctgtggtcagagctaattaacagcagagctggtgttgaacccactaccatgccaaagtcaatactttcctctttgtaattcctctgattcatgcccctgtgaagaaaaatgcttgcagtattcaaaatgtactaatgagaccaactgtgggtagatgtttctgaatcagatctctaataatcacagatttcctagtggatgaaaattcaagtgtgtggacttgtttcttcttgtagaagtgcttcattaaaaaaatgtttctttgcttttttataggatttctctgcctcttcccaacttttcttccctgaacctgagaggtaagc

SEQ ID NO: 4543 - DNA, 402 bp, Mesocricetus auratus; identical to SEQ ID NO: 901

SEQ ID NO: 4544 - DNA, 640 bp, Mesocricetus auratus; identical to SEQ ID NO: 902

SEQ ID NO: 4545 - DNA, 1400 bp, Mesocricetus auratus
  misc_feature (54)..(70): n is a, c, g, or t
tcgctcaacgaggaaatcgcattcctgaagaaagtgcacgaagaggagatccgnnnnnnnnnnnnnnnnnttcaggaacagcaggtccaggtggagatggacatgtccaagccagacctcacagcggccctcagggacatccgggctcagtacgagaccattgcggctaagaacatctctgaagctgaggagtggtacaagtccaaggtttcagacttgacccaggcagccaataagaacaatgatgccctgcgccaggccaagcaggagatgatggagtaccgacaccagatccagtcctacacctgcgagattgatgccctcaagggcaccaatgactccctgatgaggcagatgagagagctggaggatcgctttgccagcgaggccagtggctatcaggataacattgcacgcctggaggaggagatccggcacctgaaggatgagatggcccgccacctgcgggagtaccaagacctgctcaatgtgaagatggccttggatgtggagattgccacctaccgcaagctgctggagggcgaggagagccggatcaaccttcccatccagaccttctctgctctcaacttccgagaaaccagccctgaacaaaggggttctgaagtccacaccaaaaagacggtgatgatcaagaccatcgagacccgggatggagaggtcgtcagcgaggccacacagcaacaacacgaggtgctctaagccagacactgtcctggtccccgtggtcactgcctcctgaagccagcctcttccactctcggatgtcacacccagccactttccttcactcacagaatctgacccttcctcaccgatcacccctttgtggtcttcatgctgcccaggaaacaccccagcacctctgcagaccttaccatgagtcctggctgtcggcagtcgcaagcctggctcttcagatagaacctagttcaagtcatggccctttccctcccacctttgtaacctcaggctctacgctttggctttggagatggtaccagagaaggtgttgggatctgtagggtcaggacagagctttatagacaccctcacattcgacccccagcctgggtcagagacagagtgaagcctctcagctgaggtgggggaggggctgaaaaaatgtccttgcgtcccctctctttcccatcccagcccaggatgggttagaaaagctggggctgtaagagggaacctgaaggtgctggatgtgggagcaggagattcagaaggagagcgggtgggtgagaagctggagggaaagaagagagaggcagagagtgggcccaggctggtgggagggccccacctctcacgcctgcccctcccactgcaggggccctggacagaaacaataaagagccaagcacaaacct

SEQ ID NO: 4546 - DNA, 280 bp, Mesocricetus auratus; identical to SEQ ID NO: 904

SEQ ID NO: 4547 - DNA, 166 bp, Mesocricetus auratus; identical to SEQ ID NO: 905

SEQ ID NO: 4548 - DNA, 437 bp, Cricetulus sp.; identical to SEQ ID NO: 906

SEQ ID NO: 4549 - DNA, 600 bp, Cricetulus sp.
  misc_feature (493)..(507): n is a, c, g, or t
tttctgatctggcctgttaattgttaatctgtttactctcacctaggatgatcagcatggacattgaacaagtggttaccctgagcttagcttttctgttggctgtcaagtacattttctttgaacaagcagagacagagtccacactgtctttaaaaaatcctatcacgtctcctgtcgtgaccccaaagaaagctccagacaactgttgtagacgggagcctctgcttgtgagaaggagcgagaagctttcatcggttgaggaggagcctggggtgagccaagatagaaaaggtactttgctgttctcttggtttcagttatcctgtctgagggtgcaccctgaagctgagttcgtttcaaggtgatgttgtctttttgcctctcacacagttgaggttataaaaccattagtggtggaaactgagagtgcaagcagagctacatttgtgcttggcgcctctgggaccagccctccagtggcagcgaggannnnnnnnnnnnnnnttgaactccccagtgagcctcggcctaatgaagaatgtctgcagatactggagagtgccgaggtgagggcgagggtgtgcactcacacttggg

SEQ ID NO: 4550 - DNA, 416 bp, Mesocricetus auratus; identical to SEQ ID NO: 908

SEQ ID NO: 4551 - DNA, 394 bp, Cricetulus sp.; identical to SEQ ID NO: 909

SEQ ID NO: 4552 - DNA, 509 bp, Mesocricetus auratus
  misc_feature (401)..(465): n is a, c, g, or t
aaaaaccaaaaaatgaaatttctcatcttggattaaaataagaaccgtgtgtttacagatttgcacgtctacagaagcttcatgtgaccatggcagggcgcaacctgtacatccgtttccagtccaagacaggggatgccatggggatgaacatgatttccaaggtaagtgtagatctactgtatctgaaaggatggacacacccagaactcattgcttggtgcaggttggccttgaactcatggtgatgcttgtgcctctgctttcttgagtgctgggattacaactgtgcactactgtacccagccatattttttgttgatacactgtctatatattacatgcttaatggattaattgcttttacatgtttattaagccaggtgttggtgcgcacgcgnnnnnnnnnnnnnnnnnnnnnnnnnnnnnnnnnnnnnnnnnnnnnnnnnnnnnnnnnnnnnnnnnccagagtcgagtgccaggataggctccaaagcttcacagagaaa

SEQ ID NO: 4553 - DNA, 270 bp, Cricetulus sp.; identical to SEQ ID NO: 911

SEQ ID NO: 4554 - DNA, 430 bp, Cricetulus sp.; identical to SEQ ID NO: 912
  misc_feature (310)..(324): n is a, c, g, or t

SEQ ID NO: 4555 - DNA, 369 bp, Mesocricetus auratus; identical to SEQ ID NO: 913

SEQ ID NO: 4556 - DNA, 144 bp, Mesocricetus auratus; identical to SEQ ID NO: 914

SEQ ID NO: 4557 - DNA, 183 bp, Mesocricetus auratus; identical to SEQ ID NO: 915

SEQ ID NO: 4558 - DNA, 184 bp, Mesocricetus auratus; identical to SEQ ID NO: 916

SEQ ID NO: 4559 - DNA, 189 bp, Mesocricetus auratus; identical to SEQ ID NO: 917

SEQ ID NO: 4560 - DNA, 125 bp, Mesocricetus auratus
acttacctggtgtggcatcttgtgtgactttaagggagtacagagtggcagccaagccagacccataagagaacactccgatccttttccctgccaactgctgaggcgagtacctgtgtaaggga

SEQ ID NO: 4561 - DNA, 144 bp, Mesocricetus auratus; identical to SEQ ID NO: 919

SEQ ID NO: 4562 - DNA, 182 bp, Mesocricetus auratus; identical to SEQ ID NO: 920

SEQ ID NO: 4563 - DNA, 1380 bp, Mesocricetus auratus
  misc_feature (121)..(140): n is a, c, g, or t
taaaactttatacctctctggacgcctatatgcatgcagtttagtttccaaacatggcatgaaccgagtgcttctgccaacaataagcggaggtactagtgtccaattttaaaaattgggnnnnnnnnnnnnnnnnnnnngtgtaagaattttgtactttaacaaatgaaggagtgcttgtagcttttgaaaaacttttctatgttggggattgtggaatttaaatgtcacacacaaatcctgcttgaaaatggcaaggcaaatatctttttcgaagacttgtaaatcctgaagagagaggtacggttctaggatcaaccatcggtgtgagaaaggttagccgtgaccagagagatgatcagagagatgctggctctgagcaggcctctgccacagcaaatggttcacgtggcgctgtaagcgcagctgggaactggtttcagccagttcaagtggctagtctctgcagcactcagacgctggtgtgagggaacttgttgccatcctggcaccctccttgcaaggctaaaatgtaatgtaggaaggatggggcagtgcattattaggtcacagtgttacaaacccagttcataggctggcagcttaaatccaccagacacctttttctttgtggtatgtgtatttttgtgttttgtttgtttttgtatctgttcaatgaaaataaatatatataacccacattttcacagagtgaaaatttcacatagtctgacaagccaaaaggaatattcatttcaagatctagaagtagaattcataacattttcccccttgactttcacttttaaaacaacaagatctaccacatgagatgagtaagaaaattcactaggagttctctgggtggttttggtgctgaacaatgacatgaccctcacagactgtaaaatagagatagttggaactaatgtacagaactaaatttttttaactttatttgctgttccattctgtgaagtttcagttatctaaactaaacacataaatgtgtaaaagtttcagattgcaaggtaatatgtaatgtagcatttgtaagatattcttgtcaatattaaccagtagaattttgatttgtacagttttaattggttaaaatggtttcattttaacatccactgctatagatgaataatgtaagttcagatttaaagaatggtggggaaatggtgcatgtaattcttttgcaagtattgagagttctgtatgttttgaaaagagtaatgttctggtgccaagaagtggattttctcagagtccattgccagcagtgggcaagcctggcgatcctggcacggagcgttaaccatacaccttactaatagcaaggtggataacttttaaataaagttttagacaaat

SEQ ID NO: 4564 - DNA, 93 bp, Cricetulus griseus
ctttcttcttcccaggaacaccatggacgccctgccagcctgcctgctccgggatgtggcccaggaggccctgggtgcggctgtcattggcat

SEQ ID NO: 4565 - DNA, 120 bp, Cricetulus griseus; identical to SEQ ID NO: 923

SEQ ID NO: 4566 - DNA, 150 bp, Cricetulus griseus; identical to SEQ ID NO: 924

SEQ ID NO: 4567 - DNA, 600 bp, Cricetulus griseus
tgggccagacaacaaagagaactgcccggtgctgggacagcctggagaggcctcagctgtcaggaagctcttcgcccctcagcaagtcctacagcacaactccaccaactgagaggacctggggcctgccagctcctaccccaggttggattctcagagagcagaggacgggctgggactgccgtgcctgatggacaatgtgccctggagaggctcacccgcttctcacagccttttttagttcccttcttggttgctgagatgctttagcccagactagagccagcgcctgcctggtggttagggtttgacatccagccagaggtaggacaaagccacagggtgttgtgacacagaggtgctggcttcttccttcttggtggcttccagtctcaagggccccgcccccgagcaaggcttcacaaccctcactttgtgctgaagcttgacccacaatggcccctagcggtgtctttacaaagtggtgctgttcttgccctactcagagccccaagactcaggactcttggtgagagcctgtgcttcttgtgctatagtgtaaaatgaataattaataatattaaagtttctacttgagag

SEQ ID NO: 4568 - DNA, 429 bp, Cricetulus griseus; identical to SEQ ID NO: 926

SEQ ID NO: 4569 - DNA, 600 bp, Cricetulus griseus
agagacgtgggaagtgggcttttcccaggaggggtccgctactcgggatgcccgagcctgatcggggggccagggcctcggaaatctgtggggaccaagtggacagcctaggtccctcccggagcccccgaaccggtgttgtcggcggctccagcccccgcggtggatcccgagccccgagccgcgggcctctggagcagcacgctggggccaagtggaacccgcagcggcggcgcagggcggggcagagcagcaggatccagagcccagctcaggtccacgtgggtgacccaggagctccgggatccccggggtgagttctctccaggcctgaccctgtgagcaccagggcgggactcctcacgctgggctctgcggggcagtaaggtcagcctagactccggccctgcggccatgcatttggctgacgactgtggtttctccccaggtcgtgatggagtttgaagaggactttagcggaagaaaagacaagaacttcttgaagatgggcagaaagaggtagggggatcgtttcactttcacacttaacgggtcttgtagtttgtagcctccagcgctgcactaaatgacgagtgtttg

SEQ ID NO: 4570 - DNA, 600 bp, Cricetulus griseus
tgagcttttcccaggaggggtctgctgctcgggatgtctgagcctggtcggggggccggggcctcggaagtccgtggggaccaagtggtcactgccccccaggtgctcccggagcccccgagccggtgttgtcggcggcgccagccccgcgcggtggatccgctgccccagctccgagccgccggccggtggagcagcacgctggggccgagcgacccggaggggcggggcggggcggggcagcaggatccagagcccagctcaggtccacgtgggtgacccgggaaacctccgggatccccggggtgagttccctccaggcccggccctgagagcatcagggcgggagtcctcaccgctgggctccgcggggcagtgaggtcagcctagactccgtccctgcggccatgcatttggctgatgactgtggtttctccccaggtcgtgatggagtttgaagaggactttagcgcaagagcagacaagggacttcttgaagatgggcagaaagaggtagggggatcgtttcactttcacacctaacaggtcttgtagtttgtagcctccctccagcgctgcactaaatgagtggttgttatc

SEQ ID NO: 4571 - DNA, 600 bp, Cricetulus griseus
tatatgtaaattatatttatcttttatcttatactacaaatataagtaaatattttaaaaccagtaactttaaaattacctacctttcagaaatgaaaataagaacatttgtgctttaacctttgaaatagaatgtttattcatccactgataagttaaaataattttatctgatttgtttcaagaaactcaaaaatattcaaagtaatcatgcactcaaaggtcttcgtaaggttacagaaaattcaataaaatcttttttgtgtagggactgagtcagggtctagaagatgcttggcaggtactccagtagtgagctggatccagaagattccttaaactttaaaatcttaacactaagtattatcacagagttattacctaagtagaatatttttcctttccttttcaattgacagagtcccacagcaacacagctggctgtaactcttcacatagcttgcgcaggctttgaactcactgtactcctgcctttccttttctaggaaattattttccacatcaagaaaatttaattgttccgatgaggtatagagtaacaaatttctgttatatattcatctgtattaaactgaattc

SEQ ID NO: 4572 - DNA, 600 bp, Mesocricetus auratus
gccgaagccgcaccccccgccgcggccgccaccatcgccgcagcggcagccaccgctgtcgtcgccccaacctctacagtcgctgtggcccctgttgcatctgtcttggagaagaagacaaagagcaaggggccatacatttgcgccctgtgcgccaaggagttcaagaacggctacaatctccggaggcacgaagccatccacacaggagccaaggctggccgggtcccttcgggtgctatgaagatgcccaccatggtgcccctgagcctcttgagcgtgccccagctgagcggggccagcgggggagggggagaagccggggctggcggaggcacaaccgcggttgcagccggtggcgttgtgaccacgaccgcctctggaaaacgcatccggaagaatcacgcctgcgagatgtgcggcaaggccttccgcgacgtctatcacctgaaccgacataagctgtcgcactcggacgagaagccctaccagtgccctgtgtgccagcagcgcttcaagcgcaaggaccgcatgagttaccacgtgcgctcacatgacggcgctgtgcacaagccctacaactgctcccactgtggcaag

SEQ ID NO: 4573 - DNA, 580 bp, Mesocricetus auratus
gagaatgatggagacaggtggggttgatgatgctgggcagtcaagagggatgacaaatgtccagagaagcaggtagaagtaggaaggtggggaggggaaggctggctcggatgacctaagacattctgagtcacacagccagaggcctcgcttaaagggagcactgacttacaaaaggaagcaagcaccagcacagccaggctcctaaggaattcctggccagagacatcttcctacctctgaaggctctgccgtctcttcagaaaggcagccaggtgccagcaggtaagcagaaactgtgttctaagcctcctttgtgtttcggtgctcctggggccattctggagggcacagttcttgctgtatggcttgggtttatagaagcagctaactcagaacattggtcccgtgtggtaggcggaaaagcaatgggcatgagaacagtcaaccttgcatggctgtgcacaagccgtgatgcactgctatctgccttaaggtcccgatgtttgcacctgaaggacttgcgagagctgtgtccggacacacctgtgagcagggacagtgcagactgcgtaccaga

SEQ ID NO: 4574 - DNA, 600 bp, Cricetulus griseus
  misc_feature (498)..(558): n is a, c, g, or t
gaagttccttgggatggtgatggggatatcaagggctgggaccagagaggttcagacccctgctccctaccactggatgagggctcctgtactgcctacaccctgcgctggtaccatcgggctgtgcctggtggcacagcctgccatccctttgtctatggcggctgtggagggaatgccaaccgttttggaacccgtgaggcatgtgagcgccgctgcccaccccaagtagtccacagccaaacaacaggtgctgcctagggccgaagcctgcatgatgcactagatggtcagcagttcctggaggtggcagggctcagcggggtcctgccattctccgtttggtgctagagttctgtgtgcccgtgagcgtgtgtgcgtgtccaccatttcagtgacttggtcctgtgggtctagccttcccccttgtggacaaatccccattgtggtgcctgctttcctggcagatgactcacttgttgggggtggttgtgggannnnnnnnnnnnnnnnnnnnnnnnnnnnnnnnnnnnnnnnnnnnnnnnnnnnnnnnnnnnnctgtttcggggggagagcattaaagctgctgttttaaaaggc

SEQ ID NO: 4575 - DNA, 448 bp, Mesocricetus auratus; identical to SEQ ID NO: 933

SEQ ID NO: 4576 - DNA, 600 bp, Mesocricetus auratus
gccgccgccaactcccggcttcgacggcccgggtgcacacaggtaagccaccagcgttcgctgcccagcacctggccagccaccttcaagcccctatggtgcagatggtcgagccgactccctacctcctgcttctcccggtctgcttgttcctaactgtcccttcattatgcccccgtctagccgctggaaagaactttcagagctggttctccagcttagggatcacaaataattcctcctggacgcctcaagattttctcaccaagcagttctttgggtgcctctgaccttacaaacatccatgtcccatccccaaataccattctaatcagcaccaatcccctcctctgcgttagtttttactaggtctaagtccttttgctttgcttttcagcacatataggaacacacacactcctgccctcaccgccttgccttcttgttacaggctcgctgctgggcacaaaggctccagcatggagctggcatggggactaggtgttcttttcctgttgatgtgtgtggaaatcgaattccagtgagtctccgattccctctctctctctctttctccctctccctccacccctctctcta

SEQ ID NO: 4577 - DNA, 600 bp, Cricetulus griseus
accccactttaaatccaatcaaaaaacgactgagaactctagaactctctgcggttattgctctgtgagcagctgtacctgatactctcactgcctcacctgatgactgggcctctacagctgctgcagccaccttgctcctgaggccttagactggaaatgcattctcttccttttaactgagtttctatctctttattctaccaataagagttaagatgctggttgaaaacctactacctcagagagaaagagcttcctgtacaccaggggaaatatgacaggagcttagaggactccactggaaaaaacactcagtaactattgccacagcacagatcttagatttcaggaaaccaatggacaaatttatgacattcgaaaggtttcctggaacatttatagttacaaaagagactcactaatcaaggcaagtttcagacacgctgcttgaacaaactgttggggttactccaaagagaaatttctaccattctgtgatgacattcttagcatttgtgagatgttcatgttgacattccaaaataattaacttagtattttccattaggcattcattaaagttggataggatctgaa

SEQ ID NO: 4578 - DNA, 600 bp, Cricetulus griseus
tcggcagggagtgacgacgtgtataagcacatcaaagaagcaggcatgtttgctccaacacagaggacagaaggtatctccacatcagacatcatcacccgcattgtccgtgactatgatgtatatgccagacggaacctacagaggggctacactgccaaggagctcaatgtcagctttatcaatgagaagaaataccacttgcaagaacgggttgataaagtaaagaagaaagtgaaagatgtggaagaaaaatcaaaagaatttgtgcagaaggtggaagaaaggagcattgacctcatccagacgtgggaagagaagtcccgagaattcattggaagtttcctggaaatgtttggtccagaaggagcactgaaacatatgctgaaagagggaaaaggtcggatgctgcaggccatcagtcccaggcagagtcccagcagcagccctactcatgaacgctccccctccccctcctttcgatggcccttctctggcaagacgtccccatcttcctccccagcaagtctctctagacacaaggctgtgacctgtgacatcagtgaagacgaagaggactaacttttcatgcccgctccc

SEQ ID NO: 4579 - DNA, 340 bp, Mesocricetus auratus; identical to SEQ ID NO: 937

SEQ ID NO: 4580 - DNA, 413 bp, Mesocricetus auratus; identical to SEQ ID NO: 938

SEQ ID NO: 4581 - DNA, 600 bp, Mesocricetus auratus
tatgcaggcagtgggaccagggatagggctctggacccggccaagagggcccaactgcagaggaggctggacaagaagctgggtgagctcagcagccagaggacaagcaagaggaaggagaaggagagggggacatgaggcgatgtccccatgcagggccgagtggggcagagggccagggcctgtgaccagcttcctcggcagcaggtggaacacagtccagcactagccatttctatgctcattctggcatatccccctatttctcagtgacaagggtggtgttctcaaagagacctgcttggtcttagactccatcagattaactgcctgactgcccagaccccattaatgctgctcaggtgcgtgtcctgagaagtgagtgccgtgcatggctagctggccatggccacctccatcctgtcttcaatgacacagtgggcataaagtgtgtgctctggggataggagggtggctgctccagggctgggaggctcctagcctgtgattgcctgcactctgctgctgcttggtgactggtgagaaggagccatcccagggcacctcactgctcacctcacaaagtctgcatcctctcca

SEQ ID NO: 4582 - DNA, 1400 bp, Cricetulus griseus
  misc_feature (1056)..(1201): n is a, c, g, or t
gcccacaaaccccactgtgattaagtacaatgtgactggtgaaaacggaacctgcctgcttgcctctatggccctgcagatgaacatcacctacatgaagaaggacaacatgactgtgaccagagcattgaacatcagcccaaatgacacagctagtgggagctgcagtcctcatgtggtgaccttgacagtggagagcaagaacagtatcctggatttgaagtttgggatgaatggcagttctagcctgtttttcctacaagaagtccggttgaacatgactcttcccgatgccaacgtgtcgtcactcatggcctccaaccaatcactgagagctcttcaggccacggtcgggaactcctacaagtgcaacaccgaggagcacatctttgtcaccaaggagttttccctcaatgtcttcagcgttcaggtccaggctttcaaggttgaaagtgacaggtttgggtctgtggaagagtgtatgcaggatggtaacaacatgctgatccccattgctgtgggtggtgccctggcagggctcgtcctcatcgtcctcatcgcctacctcatcggcaggaagaggagtcatgccggctaccagaccatctagccggtggacaggcgggtgcgcgtgcgccagacgcacaggggcctgttcttatgtccccgagcttagataggtgtggaagggaggcacactttctggcaaactgttttcaaatctgctttatcaaatgtgaagttcatcttgcaacatttactatgcacaaaggaataactattgaaatgacggtgttaattttgctaactgggttaaatattttgctaactggttaaatgttaatgttaccaaagtagagctctaaggaggacaagaaggctttcagaatcgcacggctcccccatttgacttttttaagacttggtgtttggtttcttcatcctgttactcagatttaagccttacaaagggaatctctggcctgacacttgggcgtggtaagggcggctgatctttaggctgcacgctgaagatgctagaagggaagagcaggnnnnnnnnnnnnnnnnnnnnnnnnnnnnnnnnnnnnnnnnnnnnnnnnnnnnnnnnnnnnnnnnnnnnnnnnnnnnnnnnnnnnnnnnnnnnnnnnnnnnnnnnnnnnnnnnnnnnnnnnnnnnnnnnnnnnnnnnnnnnnnnnnnaaaaaggcattatttttatttactttttgtaaagtgatttccagtcttctgttggtgttgagggtggccccgtttctgcactgtgtacaataaaagattcacactgctgacctgtcctgccgcataggtgggttgtacactgaggaccagctcacgtaatgcattgcctgtaacgatgctaataaaaagtctccttctt

SEQ ID NO: 4583 - DNA, 600 bp, Cricetulus griseus
gagctgaaccaattcagagcagatatcaaggcaatgggtctgagtctacagtggctgtattctgctcgtggagactttttccgtgctacatctagactgacgactgatttccataatgctgagaaaacaaacagatttgtcgtgagggaaatcaataaccgtattatgaaagtggaatatcacttcctgtcaccctacgtatctccaagagagtctcctttccgacacatcttctggggttccggctctcacactctcacggctttagtggagaacttgaagcttcgtcagaaaaacagtagtgcttttaacgaaacactcttcagaaaccagttggccctagctacttggactattcagggagttgcaaatgccctctctggtgacatttgggatattgacaatgagttttaaatgtaacataattaaataagagcagggcagtctgtttctagacttgtactggttgtgctaaattttcattagagctcaaatctaatgttataattctacccgatcatcctgatactaaatgtctttaggcagcagcttttagtgcagggttggacctacacttgaagttacagtggataacacttt

SEQ ID NO: 4584 - DNA, 1400 bp, Cricetulus griseus
  misc_feature (1206)..(1227): n is a, c, g, or t
gacttcctccctttgggcacttctcacacacctgcagtggccagggtgggggtcaggagtgtaaggccatgctggctgcccttggctggtcacgcttggaactcttggtttattctgcatacaatgtgcagccaggagagctagagaagcagaccatctcagtgagctctagctcctctgcaggagggcagcatgcctttattttatggttagaaaggctaaatttctatcaacctagctaaaacattccttttccttgtttcttttttcctcccgttaccatggtgcaaaccagcccgagcgatcgacccgttgtacagccttagcattcccctctcgagcctgcgctggaaggatgttctgcaaacaggagcgtggactatctgaaccatcctcatagtgagtctttatgactgtaagattgtaaatacagattatttattaaccctgttctacctggaattagattgcatatggcaaatgtttgccagcaggtagctgaggcggatcagcaaattgctccagaaccagtgtgtggaatgaccaacagaagtcatcacttttcatttggggcttagagtgatgatttggactcctttggctttcccctttcttttctcgttcgtgtaggaattaggtggcggtcccattgcattcagagagtagagtaaaggaagccagaagtcgatcgtacacactctggcattgacagagaaactataagcctctttattacgagaaagcgatacaaacatgtttctttagttcattattttcccaaaagagtcaaaggtggaacttatatacaaatattacctcatttgttgtgtgactgtgtaaagaattttgcaacaagtagaaagagtttaagtgtcaaaaaacttaaaactactgctgtgtctaaaaagtcagctgttgtacctagcataaaaatcctttgcagaagatgatcccaataaagaatagctttgaaagttaaatacaacttctcaaagttactgctttcgttctatcatctttggtaccgttgcttttatttttataattattttctcattgccattggaatagagatctcagacatgtagatatgctatttaaataatttatcaggaaatactgtcatgtagagtattctatttttatacgtttgcacactgaattgaagaaatgttggttttccttgttttagtttagtttgtttcnnnnnnnnnnnnnnnnnnnnnnctttttactccccagttttactattttgccaatacccttttttttcctaggaatgtgcttttttttgtacacatttttattcattttacattctaaaacagtgtaacttgtatattactgtttcttatgtacaaggaacaataataaatcatatggagatttatatttataaa

SEQ ID NO: 4585 - DNA, 600 bp, Cricetulus longicaudatus
  misc_feature (547)..(561): n is a, c, g, or t
taaaaggaaagtgaaaaggattaattgtattttaaagctacaggttaatgtattttgatgagatgttaaattctcagaaattttattataaatcggactaagttattttatgatatgaaaggttatttatgataaagtttttgaagcacaatatctaaaataaactggtatggaataattgcatcattttcactgtgtggtttgtgttgtgcaacattgactattaacagacatttcattgaagccttgctttacactaggcagaaaaatgggtgattttagagggcttggataagggaaaaaaatgtttacggattccccttgcaaagtttgaataactacaattagttattttaatgctacaaaaatgcatgcaaaatgtagaagcagagaggagggcaaccagggccacttggaagattagtggagcttttgctgaggagaaatcattttcttggggtcttaagaaataaccttaatttctctagttagagagaggaaagggatgttgctaacagcagtttgtgcagaggtgtggaggcctgannnnnnnnnnnnnnncatagagactgactctgcatgcctctggtgtagaaagat

SEQ ID NO: 4586 - DNA, 1400 bp, Cricetulus griseus
gatctttgacaaacctgagaaaaacaagcaatggggaaaggattccctgtttaataaatggtgctgggaaaactggctagccatatgtaaaaagctgaaactggatcccttccttacaccttatacaaaaatcaattcaagatggattaaagacttaaacgttagactgaaaaccataaaaaccatagaagaaaacctaggcattaccattcaggatataggcatgggcaaggacttcatgtctaaaacaccaaaagcaatggcaacaaaagccaaaattgacaaatgggatctaattaaactcaagagcttctgcacagcaaaacaaactaccatcagagtgaacaggcaagccacagaatgggagaaaatttttgcaacctacttatctgacaaagggctactatccggaatctgcaatgaactcaaacaaatttacaagaaaaaaacaaacaaccccatcaaaaagtgggcgaaggacatgaacagacacttctcaaaagaagacatttatgcagccaaaaaacacatgaaaaaatgctcaccatcactggccatcagagaaatgcaaatcaaaaccacaatgagatatcatctcacaccagttagaatggcaatcattaaaaagtcaggaaacaacaggtgctggagaggatgtggagaaataggaacacttttacactgttggtggaactgtaaactagttcaaccattgtggaagtcagtgtggcgattcctcagggatctagaactagaaataccatttgacccagccatcccattactgggtatatacccaaaggactataaatcatgctgctataaagacacatgcacacgtatgtttattgcagcactattcacaatagcaaaggcttggaaccaagccaaatgtccaacaatgataaactggattaagaaaatgtggcgcatatacaccatggaatactatgcggccataaaaaatgatgagttcatgtcctttgtagggacatggatgaaattggaaatcatcattctcagtaaactatcgcaagaacaaaaaaccaaacactgcatattgtcactcataggtgggaattgaacaatgagaacatatggacacaggaagggaaacatcacactctggggactgttgtagggttgggggaggggggagggatagcactgggagatatacctaatgctagatgacgagttagtgggtgcagggcaccagcatgtcacatgtatacatatgtaactaacctgcacattgtgcacatgtaccctaaaacttaaagtataataataaaaaaaaaaaagaataatggccagggtttgatggacaaggtgcctggggaatctgggtttttctgccttaactcttcaccttattcctggtcacattctaggcatag

SEQ ID NO: 4587 - DNA, 600 bp, Cricetulus griseus
  misc_feature (469)..(488): n is a, c, g, or t
gtttttttcttgtaaatttgtttgagttcattgcagattccggatagtagccctttgtcagataagtaggttgcaaaaattttctcccattctgtggcttgcctgttcactctgatggtagtttgttttgctgtgcagaagctcttgagtttaattagatcccatttgtcaattttggcttttgttgccattgcttttggtgttttagacatgaagtccttgcccatgcctatatcctgaatggtaatgcctaggttttcttctatggtttttatggttttcagtctaacgtttaagtctttaatccatcttgaattgatttttgtataaggtgtaaggaagggatccagtttcagctttttacatatggctagccagttttcccagcaccatttattaaacagggaatcctttccccattgcttgtttttctcaggtttgtcaaagatcagtcagtgctcttaacctnnnnnnnnnnnnnnnnnnnntaactccagctttaaggggctccaaaacctctgacctcctcaggtacctacatgcatgtatacatactcccacataggcacttatacacctacacacaattaaaaataataa

SEQ ID NO: 4588 - DNA, 313 bp, Mesocricetus auratus; identical to SEQ ID NO: 946

SEQ ID NO: 4589 - DNA, 1400 bp, Cricetulus longicaudatus
  misc_feature (388)..(438): n is a, c, g, or t
  misc_feature (508)..(533): n is a, c, g, or t
  misc_feature (658)..(716): n is a, c, g, or t
  misc_feature (1245)..(1262): n is a, c, g, or t
gcttaccccacatcacactgggagggttgtccatctgaggaggaagaggatggagaaactgtgaaaaaggctttccgagcctctgctgactctccagggcacaagtccagcacttctgtgtattgcccaggggaggcagaacatcaagccacggaggaaaaacaaacagaaaataaagctgacccccccagctctccttcaggctcccactccagagcctgggagtactgctctaagcaggagggagaagccgacccagagccacacagggcagggaagtatcaactgtgtcagaatgcagaagctgaagaggaggaagaagccaaggtttcatctttgtctgtgtctagtgggaatgccttcctgaaggcctgggtgtatcgacctnnnnnnnnnnnnnnnnnnnnnnnnnnnnnnnnnnnnnnnnnnnnnnnnnnngagggtaaggccttgtcttcccctacctctcctgaacatgacttcctgaaggcctgggtatatcgacctnnnnnnnnnnnnnnnnnnnnnnnnnntagtgactggggatcagctgaggaagagggtaaggccttgtcttcccctacctctcctgaacatgacttcctgaaggcctgggtatatcgacctggagaggacacagaggatgaccaagacagtnnnnnnnnnnnnnnnnnnnnnnnnnnnnnnnnnnnnnnnnnnnnnnnnnnnnnnnnnnntgcctttctcaagacctgggtctgttgccctggagaggacacagaagatgacgactgtgaggttgtggtcccagaagattcagaagcagctgacccagacaagagtcccagccatgaggctcagggttgtctgcctggagagcagacagagggacttgtggaagcagagcactctctcttccaggtggccttctatttacctggagagaagccagcaccaccttggactgcccctaagctgccccttcggctgcaaaggaggcttacgttgttgagaacccccacccaggatcaggaccctgagactcctttacgggccagaaaggtgcatttctctgagaatgtcacagtccatttccttgctgtctgggcaggaccagcccaggctgcccgacgtggtccctgggagcagcttgcacgagataggagccgttttgctcgaagaattgcccaggcggaggagaagctgggtccttacctcacccctgccttccgagccagagcatgggcacgccttggaaacccatcnnnnnnnnnnnnnnnnnngcccatctgtgaccacaccttcttcccttcccagtgaagcccctccttccagcctggactgcggtgggaggcgtggctaaacccaagtcgtttcctgttatttattttaataagaaataaagccttttgatttataca

SEQ ID NO: 4590 - DNA, 461 bp, Cricetulus griseus; identical to SEQ ID NO: 948

SEQ ID NO: 4591 - DNA, 540 bp, Mesocricetus auratus
  misc_feature (31)..(49): n is a, c, g, or t
  misc_feature (89)..(106): n is a, c, g, or t
  misc_feature (128)..(150): n is a, c, g, or t
  misc_feature (205)..(222): n is a, c, g, or t
caaggaaggaccttgctggcttgatgtcttnnnnnnnnnnnnnnnnnnnattttttgtttttcgagacagggtttctctgtgtagcccnnnnnnnnnnnnnnnnnnctctctacttttttgtttttcnnnnnnnnnnnnnnnnnnnnnnncctggctgtcctggaactcactctctagaccaggctgcctcaaactcagaaatcnnnnnnnnnnnnnnnnnnaaatgctgggattaaaggcatgcgccaccactgcccggcattgatgtcattttaatgtgttcccaaatggcccacatcctagaaaattggtctcctgtgtgtggtgctgatgggggtgaagcctttaagaggtgggacctggtatgaggtcaccacactcaaagatttcatgaggttgtcacaggagcacatgaggctgtctcactggctttggcccttccgtgggtgcttctccaccatgtaataatgttgctgggtagggaagggtttaccagggctggctccgtactcgttggactttgagcacagattgagcaa

SEQ ID NO: 4592 - DNA, 542 bp, Cricetulus sp.; identical to SEQ ID NO: 950

SEQ ID NO: 4593 - DNA, 1400 bp, Mesocricetus auratus
catatttttgcactcctgtgtggctgggtgcctcatgagacctgtccagacaagtccacgtaagtcgaagtctaaaagtaaagttggttcaagacaagatggaagtatgaagaaagccagtaaggtatcaacagcagagaagattaatcgctttttagatttcagcctttttaagcatagaggatttttgatctacctatctggaaatgtcattatgtttctagggttttttgcccctattatattcttggctccatatgctaaagacaaaggagtggacgaatataatgcagctttattgctgtctgtgatggcttttgttgatatgtttgctcgaccaactggaggattaatagccaactccaagttaatccgtccacgaatccagtacttcttcagctttgcaatcgtgttcactggtatttgccatctcctctgccccctggcagatacctacccagctttggtggtctactctatattctttggctatggatttggaagtgttagcagtgtcctctttgaaactctcatggaccttgttggacctgccaggttttccagtgctgtgggactcgccacaattgtggagtgttgtcctgttcttcttggccctcctcttgctggcaaattggtcgataaaactaaagactataaatacatgtatatagccagcgggacaattgtggtaatatcaggcatttatctgttcatcggcaatgctataaactatagactcctcgccaaggaaaggaaaagagagaaagcaaggaagaagaaatcagccacccatccttccagagaatcggaggctttgagcagatcaaaacaggatgatgtttctgtcaaagtctcaaatccacacaattctccctcagacagagaaagagaaagcaatatttaacatgagtctcatcttcaatcagtgtttatcaatttacttatgagtttctttgtgtttttcaaagtgttgaaaagaattttagctaaaagaaaggatcacaaacagtaacgaaacttgtattttcctcaatgacactctgcaaatcaatattttgacatttgtttggataggtaaattttgagatcgtgaacacaggaaatccatgcagtggcttatttgcatacctgacttggggtgttgtgatgaaaaagaagaatttttaaatctttcactgacatttacttctagctgtagaatgaaatctgcatcccagacccccctggctttcgtaagcatatgtcaattccatagaatgtctctcttcaaagttctttctttttttaatttgatattgttataaaataaattgaggacagcatttctcttcacacacaaagaatcacatatccacactaacactgagtatctggagaccatgaagaaataaatgaatttg

SEQ ID NO: 4594 - DNA, 600 bp, Mesocricetus auratus
atacagtgaagacaccaactaaaatgcaaatgtatcaaagagaaaacaagtatatacctactggaagaagtaataaaaagagaaaaacagtctttgaatttgatgttaattcagatagttcggaaactactgatctcttgagcatggtttcagaggaagagatatcaaacagactttacaataataattcaccaaattctcatctaacccccaaacagactccattatcactatcaactcctgaatcttttgtgtcacttggaggtgtgagaaaaatgagagaggaccgttgggcaacaattgctaaaactgacaggaaaagaagactaaaggaagcagaaaagttatttgcttaatttcatgaaatcaatgctgatcatagagtctaataacattaaatgtttaactattttattgtttaccagagaccaaactgtactcaggaatttagactttaaaattacttgcataaataatttgtgttcatgttattatatttttggcttaaatatatgttatctgaattttaaaattgtattcagataattacatttgtttttatttgctatggatattaaagttccaagttttttaacttga

SEQ ID NO: 4595 - DNA, 600 bp, Cricetulus griseus
agatgacgacacatcacgcatggaagaagtcgactaagcttcaccagagctatatgtttgatgcttactttcattccttctgataatatattttcaaggatttttgtttgatttttgttaacatttaaaacatctgtgtggcatgttttctaaggggaagaaaaatttctttctacttgtgatactgtgatactctaggcttgactcaacgggttggtagtacatttgtgtaagacaaaatgtaacctattaacttgtggtctgcagtgtttagctgttgagctgattccttagtagaccaaatttgtcacttttggaagtgttctaagatagcttcatgtttaaaaggaaaaagattaagatgggcctaagtttcatcttaaaattttcatcccctgtagttaattctgcatgtactagtcttagaagtaaatacacaagctaaaacaactgaggaattccccatgtggcttgttttcaaagtactgagaacaaaactaagcttccctaggtcttgtaagtgagcaaggcttgtgaatggaaatatagtgcccaatcacattctgctttaaaaggtaaatacagatgagataaaaacct

SEQ ID NO: 4596 - DNA, 1211 bp, Mesocricetus auratus; identical to SEQ ID NO: 954
  misc_feature (888)..(902): n is a, c, g, or t
  misc_feature (1120)..(1158): n is a, c, g, or t

SEQ ID NO: 4597 - DNA, 253 bp, Cricetus cricetus; identical to SEQ ID NO: 955

SEQ ID NO: 4598 - DNA, 1400 bp, Mesocricetus auratus
aaagtcttcagaccagaaaccagggaggaattctgtaagctgcagacaaagaccaaggtgacagtgctggagggtgacattctggatgcccagtgcctgaggagagcctgccagggcatctccgttgtcatccacactgctgccgccattgacgtctttggtgccattcccagacagaccatcatagatatcaacctgaaaggtaccctgaacctgttggaggcctgtgtccaggctagtgtgccagccttcatctacaccagctcaattgatgttgcggggcccaactcctacaaggaaatcgtcctaaatggccatgaggaacaacagcatgaaagcacatggtctgatccatacccatacagcaaaaagatggctgagaaggcagtgctggcagccaatgggtcctccctgaaaaatggtggcactttgcatacttgtgccttaaggcctatgtacatctatggagagaaaagtccattaatttctgtcacaataatcagggccgtcaaaaatagtggtattctggatgttactggaaaattctccacagtcaacccagtgtatgtgaataatgcagcctgggcacacattctggctgccaggggcctacaagaccccaggaagtcaccaaacatccaaggacagttctactacatctcagatgacacccctcaccaaagctatgatgatttaaattacgtcctgagcaaggactggggcctccgccctgattccagttggagacctcctgtggccctgctgtactggcttggcttcctgctggaattggtgagcttcctgctgcgtccggtctacaactaccagcctcccttcaaccgacacttggtcacactctcaaatactgtgttcaccttctcctacaagaaagctcagcgagatctgggctatgagccccttgtcggctgggaggaagccagggagaacacttcagagtggatcgggtcactggtggagcagcacaagggaacactgaacacaaaggctcagtgatgtgactggcgatggcgggaacatgacctgggtgctgtcaggaaatagttgtcaggttctccagaagagacagaggcacaacccaggtcttactgcctccctttgacacagagatcaacttagtgtcttcctcaagacaccagcagctggtccctgacccagccacagggtttcttccctccacacctgcccagtgacacacatgtggctgtgcctcagctgctgtgacctgtgacaacaggcttcagcaattgcaatttcctgtcacatagagttcagtattggttttctttgcactctcaagttctatatcatatcctgcctttgagaaaatcccattgctttatgaagctcaacagaaatagaaataaatattgcaatacctt

SEQ ID NO: 4599 - DNA, 1400 bp, Mesocricetus auratus
  misc_feature (423)..(437): n is a, c, g, or t
ggtcagactcctggacaaggtgttcagaccagaaaccagggaggaattcttcaagctgcagacaaagaccaaggtgacagtgctggagggtgacattctggatgcccagtgcctgaggagagcctgccagggcatctccgttgtcatccacactgctgccgccattgacgtctggggtatcattcccagacagaccatcatagatatcaatgtgaaaggtaccctgaacctgttggaggcctgtgtccaggctagtgtgccagccttcatctacaccagctcaattgatgttgcggggcccaactcctacaaggaaatcgtcctaaatggccatgaggaacaacagcatgaaagcacatggtctgatccatacccatacagcaaaatgatggctgagaaggcagtgctggcagccaatgggtnnnnnnnnnnnnnnngtggcactttgcatacttgtgccttaaggcctatgtacatctatggggaaaaaagctcaatactttcagggataatgattagggccatcaaaaataatggtattctgaaagttactggaaagttctccacagtcaacccagtgtatgtgagtaatgcagcctgggcacacattctggctgccaggggtctgcaagaccccaagaagtcaccaaacatccaagggcagttctactacatctcagatgacacccctcaccaaagctatgatgacttaaataacaccctgagcaagaaatggggcctccgccctgattccagttggagacctcctgtggccctgctgtactggcttggcttcctgctggaattggtgaacttcctgctgcgtccggtctacaactaccagcctcccttcacccgatacttggtcacaatctcaaatactgtgttcaccttctcctacaagaaagctcagcgagatctgggctatgagccccttgtcggctgggaggaagccagggagaacacttcagagtggatcgggtcactggtggagcagcacaagggaacactgaacacaaaggctcagtgatgtgactggcgatggcgggaacatgactgggtgctgtcaggaaatagttgtcaggttctccagaagagacagaggcccaacccaggtcttacttgcctccctttgacacagagatcaacgtagtgtcttcctcaagacaccagcagctggtccctgacccagccacagggtttcttccctccacacctgcccagtgacacacatgtggctgagcctcagcttctagttccaaaatattcagcacctcttgtaccttagagctctctccattggctacatctcccccacaaaaagcatttcttacctttggaaaattcccattactttatgaagtgcaatcaaaggagcaataaatatttgttaatacctc

SEQ ID NO: 4600 - DNA, 1400 bp, Cricetus cricetus
  misc_feature (233)..(247): n is a, c, g, or t
ccctgctgtgtgtctccgccctgactgtcatctcctatgtcacacccgtgttcctcgtggccctcttacccctagctgttgtgtgctacttcattcagaagtacttccgagtggcatccagggacctgcagcagctggacgacacgacgcagctcccgctcgtctcacactttgctgaaactgtggagggactcaccaccatccgtgccttcaggtacgaggcccggttccannnnnnnnnnnnnnnatataccgactccaacaacatcgcctccctcttcctcacggcagccaacagatggctggaagtctgcatggagtacatcggagcgtgcgtggtactcattgcggctgccacctccatctccaactccctgcacagggaactttctgctggcctggtgggcctgggcctcacctatgccttgatggtctccaactacctcaactggatggtgaggaacctggcggacatggagatccagctgggggctgtgaagaggatccacgcactcctgaaaaccgaggcggagagctatgaggggctcctggcgccgtcgttgatccccaagaactggccagaccaagggaagatccaaattcagaacctgagcgtgcgctatgacagctccctgaagccagtgctgaagcatgtcaacaccctcatctccccggggcagaagatcgggatctgcggccgcacaggcagcgggaagtcctccttctccctggcctttttccgaatggtggacatgtttgaaggacgcatcatcattgatggcatcgacatcgccaagctgccacttcacacgctgcgctcacgcctgtccatcatcctacaggaccccgtcctcttcagcggcacgatcagattcaacctggaccccgagaagaaatgctcagacagcacactgtgggaggccctggagatcgcccagctgaagctggtagtgaaggcactgccaggaggcctagatgccatcatcacagaaggaggggagaattttagccagggccagaggcagctgttctgcctggcccgggccttcgtgaggaagaccagcatcttcatcatggatgaagcaaccgcctccatcgacatggctacggagaacatcctccagaaggtggtgatgacagccttcgcagaccgcacggtggtcaccatcgcgcatcgtgtgcacaccatcctgagtgcagacctggtgatggtcctcaagaggggtgctatcctggagtttgacaagccagagacgctcctcagccagaaggacagcgtgttcgcctcctttgtccgtgcggacaagtgacttaccggagccaaagtgccaccccgcgcctcgcttgcttgcctaggatttctaactgcaaatcacttgtaaataaattaattctttgct

SEQ ID NO: 4601 - DNA, 600 bp, Cricetulus griseus
  misc_feature (220)..(244): n is a, c, g, or t
  misc_feature (247)..(259): n is a, c, g, or t
  misc_feature (263)..(284): n is a, c, g, or t
gcagcgcatctcccagagccagaaggagcactataagaagctggcggaggagcagcagaagcagtataaggtgcacttggacctctgggtcaagagcctgtctccccaggaccgtgcagcatacaaagaatacatctccaataaacgtaagaatatgactaagcttcgaggcccaaatcctaagtctagccgaaccaccctgcagtctaagtcggagtcnnnnnnnnnnnnnnnnnnnnnnnnngannnnnnnnnnnnngagnnnnnnnnnnnnnnnnnnnnnnaatggggactcctctgaggatggcggggactcttcagagtctagcagcgaagatgagagcgaagatggggatgagaatgaggacgacgatgacgacgacgatgacgatgaggatgacgatgaggatgaagacaatgagtctgagggcagcagctccagctcttcctcttcaggggactcctcagactctgactccaactgagctcagcccccaccctgggcaggcagccaaggagagccactgcagagctcccctccccacctgaccacctttgtctctccctatgttctgtcccctcagcttcccccactttctt

SEQ ID NO: 4602 - DNA, 600 bp, Cricetulus griseus
  misc_feature (220)..(244): n is a, c, g, or t
  misc_feature (247)..(284): n is a, c, g, or t
gcagcgcatctcccagagccagaaggagcactataagaagctggcggaggagcagcagaagcagtataaggtgcacttggacctctgggtcaagagcctgtctccccaggaccgtgcagcatacaaagaatacatctccaataaacgtaagaatatgactaagcttcgaggcccaaatcctaagtctagccgaaccaccctgcagtctaagtcggagtcnnnnnnnnnnnnnnnnnnnnnnnnngannnnnnnnnnnnnnnnnnnnnnnnnnnnnnnnnnnnnnaatggggactcctctgaggatggcggggactcttcagagtctagcagcgaagatgagagcgaagatggggatgagaatgaggacgacgatgacgacgacgatgacgatgaggatgacgatgaggatgaagacaatgagtctgagggcagcagctccagctcttcctcttcaggggactcctcagactctgactccaactgagctcagcccccaccctgggcaggcagccaaggagagccactgcagagctcccctccccacctgaccacctttgtctctccctatgttctgtcccctcagcttcccccactttctt

SEQ ID NO: 4603 - DNA, 600 bp, Cricetulus griseus
  misc_feature (488)..(503): n is a, c, g, or t
actgagctctccgcgaggaccacatgcgggacacacagggatggaatctctgaactgaagtccctccttccttcttcaggccacctgaacttcctcctctgcacagggtcccctcatccctgggcctcccccaccccgcgcactccgcatccccggtccttctcatggccccacatacctgggcctcgcccagccccagctcgatggcctccagcgagtgcttcaccacctgtcgcttctcctccagcagctccactccaggcacagggcccggtgcagccagggcctccgccaagtgcccagcgagactgcagtgctcagcccgcagggcctccagcccctgcactacctgtctcgtctgccgcaccagctcctcggggttcaggcgctctgggcccagccctgtgcttccgggggctgccacctgcacagacatggctactcctgggggtgggggtgggggtggggggcagtgagggtgagggagnnnnnnnnnnnnnnnnacagactcacagcctctcttcattccagccatccccctgccccacccatcctggctggctcccctttccaccccaggcagccttcatgggggaattc

SEQ ID NO: 4604 - DNA, 578 bp, Mesocricetus auratus
  misc_feature (239)..(265): n is a, c, g, or t
agtcatcttgcatgaaggttctatgtcatgatctccttcccccagaaaaaagacatcggactggtcaggacttcctctggggataagaccctggagaggagctttgtacatgttccgaatttgcacatggggatttgacctctatctccactccaaagttgtgggtgtcctattgcttcaaaaataaatgattagggggagatgtgaggagccgccctcgctatcgctattgccgttannnnnnnnnnnnnnnnnnnnnnnnnnnttggagttaactgtcgctgtcagttggagttaactgtcgctgtcagttggagttaactgtcgctgtcagttggagttaaccgtttaaactgtgcctctcccgtgacgtcatctggggtgatgtgcaaaccaccaatcccggctctacacatctcactcggagctcctaggcttatataaggggctgggtttcttagcttggggtctccctctaagaagctgatcatctatgtctcaagatgcattaaagctttactgcagaaggatccgagtgttctgcgtcgttcttgctggcgagacggtagcgcgggaca

SEQ ID NO: 4605 - DNA, 117 bp, Mesocricetus auratus; identical to SEQ ID NO: 963

SEQ ID NO: 4606 - DNA, 99 bp, Cricetulus griseus; identical to SEQ ID NO: 964

SEQ ID NO: 4607 - DNA, 591 bp, Mesocricetus auratus; identical to SEQ ID NO: 965

SEQ ID NO: 4608 - DNA, 499 bp, Mesocricetus auratus; identical to SEQ ID NO: 966

SEQ ID NO: 4609 - DNA, 588 bp, Mesocricetus auratus; identical to SEQ ID NO: 967
  misc_feature (139)..(198): n is a, c, g, or t
  misc_feature (413)..(437): n is a, c, g, or t

SEQ ID NO: 4610 - DNA, 247 bp, Mesocricetus auratus; identical to SEQ ID NO: 968

SEQ ID NO: 4611 - DNA, 600 bp, Mesocricetus auratus
ctctacgctttggctttggagatggtaccagagaaggtgttgggatctgtagggtcaggacagagctttatagacaccctcacattcgacccccagcctgggtcagagacagagtgaagcctctcagctgaggtgggggaggggctgaaaaaatgtccttgcgtcccctctctttcccatcccagcccaggatgggcttagaaaagctggggctgtaagagggaacctgaaggtgctggatgtgggagcaggagattcagaaggagagcgggtgggtgagaagctggagggaaagaagagagaggcagagagtgggcccaggctggtgggagggccccacctctcacgcctgcccctcccactgcaggggccctggacagaaacaataaagagccaagcacaaacctacatgcccctgctgtcttgactggaccctgtcataccacccatcaccctgagatggacggtgtcaccctcttgccaggtagattgctctaaggcctccaggctgcagtctatgtgctgcataggggaggttggacaaggggcttctgttacaatgccacagtgatgcccctttccttaagctaccttcagatc

SEQ ID NO: 4612 - DNA, 1400 bp, Cricetulus griseus
  misc_feature (439)..(453): n is a, c, g, or t
  misc_feature (577)..(590): n is a, c, g, or t
  misc_feature (592)..(604): n is a, c, g, or t
gcaatgcctgctgggagctctactgcctggaacatggcatccagcctgatggccagatgccaagtgacaagaccatcgggggaggagatgactccttcaacaccttcttcagtgagacaggcgctggcaagcatgtgccccgggctgtgttcgtagacctggaacccacagtcatcgatgaagttcgcactggtacctaccgccagctcttccaccctgagcagctcatcacaggcaaggaagatgctgccaataactatgcccgtggccactacaccatcggcaaggagatcattgatcttgtcttggacagaattcgtaagctggctgaccagtgcacaggtcttcagggcttcttggttttccacagctttggtgggggaactggctctgggttcacctccctgctgatggagcggctctctgtcgattatggaannnnnnnnnnnnnnnagttctccatctacccagccccccaggtttccactgctgtggttgagccctacaactccatcctcaccacccacaccaccctggagcactctgattgtgccttcatggtagacaacgaggccannnnnnnnnnnnnncnnnnnnnnnnnnncattgagcgccccacctacactaaccttaaccgcctcattagccagattgtgtcttccatcactgcttccctcagatttgatggagccctgaatgttgacctgacagaattccagaccaacctggtaccctaccctcgcatccatttccctctggccacatatgcccctgtcatctctgctgagaaagcctaccatgagcagcttacagtagcagagatcaccaatgcttgctttgagccagccaaccagatggtgaaatgtgaccctcgccatggtaaatacatggcttgctgcctgctgtaccgtggggatgtggttcccaaagatgtcaatgctgccattgctaccatcaagaccaagcgtaccatccagtttgtggactggtgtcccactggcttcaaggttggcattaattaccagcctcccactgtggtacctggtggagacctggctaaggtccagagagctgtgtgcatgctgagcaacaccacagccatcgctgaggcctgggctcgcctagatcacaagtttgatctgatgtatgccaagcgtgcctttgtgcactggtacgtgggtgagggcatggaggagggggagttctctgaggcccgtgaggacatggctgccctagagaaggattatgaggaagttggggcagacagtgctgaaggagatgatgagggtgaagaatattagcccatgtgctgcaattttacacttcattgtcttgtgtttgtctttgtatgtatatgactgtcttacactatcaataaaggtgtttccatattaagtggg

SEQ ID NO: 4613 - DNA, 987 bp, Mesocricetus auratus; identical to SEQ ID NO: 971

SEQ ID NO: 4614 - DNA, 364 bp, Cricetulus griseus; identical to SEQ ID NO: 972

SEQ ID NO: 4615 - DNA, 420 bp, Cricetulus griseus; identical to SEQ ID NO: 973

SEQ ID NO: 4616 - DNA, 600 bp, Mesocricetus auratus
ccttaaaccagtctggagcggtgactcatttccccagggagaagtggcgcggccattggtgagcacgacgcaagccccgccccacccagcccggccccgccctgctacccctcctgactcactgccccgcccgctcccccgcggcgtccgagcagcagaccgagaaggcacatcgagtccactcgtcgcgtcggtggcaggtaagcggcttctgaagcctggccccgggaagggtgctggagccaggcctcggtaagccttcggcttcccagagccaagcccggcttactccggctctcggggcgctgaggccgcggggctgaggttgagtctggctgggaggtgaccgcgcacccgcagccgcgcgtctccttgagggaccgaaccccaggagaggccaggagccatcccttcctcccgagcccggctcacccccagagtcgctcggggatgggggatgggggatggggtggcatcttttgactgtcgtttgctgttttcttctctctttgtaatagctacagcgaacataattttacccagggttccaccgtggtctcgtccgtcctcggcatctctcagtccagtacatacccaagg

SEQ ID NO: 4617 - DNA, 703 bp, Mesocricetus auratus; identical to SEQ ID NO: 975

SEQ ID NO: 4618 - DNA, 500 bp, Mesocricetus auratus; identical to SEQ ID NO: 976
  misc_feature (351)..(367): n is a, c, g, or t

SEQ ID NO: 4619 - DNA, 150 bp, Cricetulus longicaudatus; identical to SEQ ID NO: 977

SEQ ID NO: 4620 - DNA, 600 bp, Mesocricetus auratus
gtatggattatgtattgtaagtacagataatctctattctcaactaaaataaaattgattaaaattgcattctatgtcgcaggccccagctctgccccctcagggctgcacggctgagccaagtgggctggtaggggaagtccaggccagcgggcagcgggtgcagccaaggcagtgctttcttccctggagcatgcggcttgtgctggatgctgcaaaaagagaggagtgtgtgaaggtgatgcgactggtaggggcggcacgagggacttgggccatgggctgggtgccttggggtggcagaaccgtggcagagcaggccaggccgtggtgggggtggagagacagggttccggttggttaatggcaccagttggccgggcttggcccctgacttaactttctgggtgcggcatgcgtgccagttgccgggggctgggggatggggggacctgaacgaggatgtcagtttggaggtctggttaatctatggagtcactgaaagtagatcagtatttatcactagaacacgaatggaatttgggagtctattccacctagagggatattctctctgcctagacacacagctagggtcga

SEQ ID NO: 4621 - DNA, 600 bp, Cricetulus sp.
acacgaggcgcgtacgcagtgcacacatacaggtacgcaaaatacccatacacataaaagaaacagacctttaaaaagtaaaaaccaattgtaacaatacaatataggctgcaaatctaaggttttcaggcagggggctcctccgggaatcggcggaggcgtcagggtggcgtcacctggctgtgacagcctgcggcccggatgcacagagcgcgcggaggtcgaggggctggcggagagcgagccaggcgccgcagcgaggggcccaggtgggacatcatgcagcaggacatcgggcttcctaagaggaccaatggctggaacgaggcagcccaacctcagaaaggcgacagagagctgaagagcctagcaccagctctggaaaacacctgagatcggagttagtccgggttgggaagggggtggaaatgaactcaaatatctcacgctcctgaaccggaaatgcttgtgctctcgctagagacgttctaggcacgaaagccggtgactcgatagccggaagtcatccgaacgtaggctaggtctaccaaggcggggttagacagcaggctgttccgtttggcagccaggatggcatcg

SEQ ID NO: 4622 - DNA, 528 bp, Mesocricetus auratus; identical to SEQ ID NO: 980
  misc_feature (143)..(491): n is a, c, g, or t

SEQ ID NO: 4623 - DNA, 600 bp, Cricetulus sp.
  misc_feature (455)..(499): n is a, c, g, or t
accggggagggggacagcgggactgagctaggtgggttccccggcgatccccagcgcctgtccgtgacgggcaggccagcacgtggtggacacctgagggagcgcgtggtggcctgcgtggtacctccacgtggcccgcctccagagtggcgacgtcggaagtggttctgtgaaagacgtgctcctctccagaaggggctacccaaatagatacccctgccccggcagatgatttagagtgaaattcaaagggcaatgaatgactagtagattgtcttcagttgtctctggaagggaaagacaagttatataggtgattctcaggaaagattgccacatataataatgccaatgatgtcacctgtgcttagggcctttaacaatatagacagtgggcattaagaaagaagataatggcgaaacgcaaaatggcttacaaatagggtatcgacatnnnnnnnnnnnnnnnnnnnnnnnnnnnnnnnnnnnnnnnnnnnnnctaagaaaatggctcctcctccaaaagaggtggaagaagatagtgaagacgaagaaatgtccgaagatgaagaagatgacagcagtggagaagaggtatac

SEQ ID NO: 4624 - DNA, 277 bp, Cricetulus sp.; identical to SEQ ID NO: 982

SEQ ID NO: 4625 - DNA, 600 bp, Mesocricetus auratus
tagaaattaagtgttcttaactcaatgaaagaagtgtgtcaggtgatggacatgtgtggattagctagacttaatcagttcacaatgtctgtatggattatgtattgtaagtacagataatctctattctcaactaaaataaaattgattaaaattgcattctatgtcgcaggccccagctctgccccctcagggctgcacggctgagccaagtgggctggtaggggaagtccaggccagcgggcagcgggtgcagccaaggcagtgctttcttccctggagcatgcggcttgtgctggatgctgcaaaaagagaggagtgtgtgaaggtgatgcgtttcactgacagatcaacaggcactgtttgttctctttcttcctcttgaatcaaatccaaaatgctttcattcttatatttttggttgtgccatcaccacccagcttgattctgaatatgacatggttattgcctacatcaactaccaaaacctgcggttgcctgcaaaagatgaagccagataaatttcttgcactaatttgattgggtggaggtgtggctttggcgtgcttgtaagtttgggcggatgaggaagtggggcgc

SEQ ID NO: 4626 - DNA, 1400 bp, Cricetus cricetus
  misc_feature (555)..(576): n is a, c, g, or t
ctcttttggtgacctataatactgtagtttaaaattctttttggtgtgtcacatatcacttgtgggaactaaatctgaagtattcccttctgttgtgtttctttactttctcatcaggatggcaacttaacaagagtgctcctccataacctgtgtcttcgttagtagcagaaatgctttagaggtctctcctgcattccaacaagttaatgggggaaagggaatatgaccactgaagactgtggcgtctccaggcatagagtagcagccatatcaataaaaagggaaatagagcaaataatatccagactctggcatgttcctgcatatgtaaaattttgcatatgttcttatttttaaattttgttactccttttttcatgtatttgtgtatcttgtgtgtggtgggggacacatgtttgcatgcagaggtcagaggacagtttacaggagctgggtctctcctcccaccgagtggtctcagggttgttctcaggtcatctaactggcaataggcatttttcccaccccatgagtgctctcaccaataaccannnnnnnnnnnnnnnnnnnnnncttggcattctgtcatgtcatgggaaaacctccaaggcaaatcattagtgactgagtgttgggaatgacagtgccacttggtcaccagtctcttccatcatgctttctgtttcactctgaccagactcctgagcaaagccaggaatatcgttgtaattttgtttaagggacagagtctttgattggcagcaaaatctttgatcagctccgtttacaaattgtgcctggtttcagtgctgcagtgtgggtttctaagccctggaacatccttgtaagggaaacagaaacagtggggagctgttttgtgtttggttactatgatgttgatgaaggaatgaagccaggcagggtggttagactatggtcggctttggagaattgtttttactggtttcttatctttcacttttcctgtacacatctgttttaatacaggtacagcctgactgtttggactggaaaggatgacagttatcccactgaagatttactttatattcgagactactttaataaaacccaagttttctatgatattttggaaccacaaagccatgaatttaaacaagccattgggatctgagtcactctaagaatacaagaagacattttctaatcattttctctcttggcttcaccatcattctctgctttgtctgaattcattgctgtattaattgtgattattggtttgtactaaattatccaatcaaaatgcttgttgtatacctactcttcctttatcatgtcttcatggctgcacacatctgaaagattttatgaactgcaataaaattgtataaaattatagtaaaaatgctcaa

SEQ ID NO: 4627 - DNA, 303 bp, Cricetulus sp.; identical to SEQ ID NO: 985

SEQ ID NO: 4628 - DNA, 315 bp, Cricetulus sp.; identical to SEQ ID NO: 986

SEQ ID NO: 4629 - DNA, 251 bp, Cricetulus sp.; identical to SEQ ID NO: 987

SEQ ID NO: 4630 - DNA, 92 bp, Cricetulus sp.; identical to SEQ ID NO: 988

SEQ ID NO: 4631 - DNA, 86 bp, Cricetulus sp.; identical to SEQ ID NO: 989

SEQ ID NO: 4632 - DNA, 97 bp, Cricetulus sp.; identical to SEQ ID NO: 990

SEQ ID NO: 4633 - DNA, 89 bp, Cricetulus sp.; identical to SEQ ID NO: 991

SEQ ID NO: 4634 - DNA, 93 bp, Cricetulus sp.; identical to SEQ ID NO: 992

SEQ ID NO: 4635 - DNA, 274 bp, Cricetulus sp.; identical to SEQ ID NO: 993
  misc_feature (129)..(146): n is a, c, g, or t

SEQ ID NO: 4636 - DNA, 356 bp, Cricetulus longicaudatus; identical to SEQ ID NO: 994

SEQ ID NO: 4637 - DNA, 444 bp, Mesocricetus auratus; identical to SEQ ID NO: 995
  misc_feature (133)..(182): n is a, c, g, or t

SEQ ID NO: 4638 - DNA, 600 bp, Mesocricetus auratus
gcctcctccctcctccccactatgggcccctgagcttccacgacatgttccagcctttcctcgagatgatacaccaggcgcaacaggccatggatgtccagttccacagcccagccttccagttcccggacatggatttgttaagagaaggtgaagatgaccgtgcagtgtgcaaggagatccgccacaactccacaggatgcctgaagatgaagggccagtgtgagaaatgccaggagatcttgtctgtggactgttcagccaacaacccagcacaggctcacctgcgccaggagctgaacgactccctccaggtggccgagaggttgacccagcgatacaacgagctgctccattccctccagaccaagatgctcaatacctcatccctgctggagcagctgaacgagcagttcaactgggtgtcccagctggctaacctcacacagggcgaggaccagtactaccttcgcgtctccacagtaacaacccactcttctgactcagaagtcccctcccgtgtcacgtaggtggtggtgaagctgtttgactctgaccccatcacagtggtgttaccagaagaagtctccaaggatcacc

SEQ ID NO: 4639 - DNA, 204 bp, Mesocricetus auratus; identical to SEQ ID NO: 997

SEQ ID NO: 4640 - DNA, 853 bp, Mesocricetus auratus
agcggctttcctctgttgtagtccacagtgcaacacatcttctcagagatgcagctgcctttgactccactgtccttctctgggacactccttttgatggcaatgtcaaattttctcctttgggaacatgtgacctcctcagcaagtcctcgtttatccactagaaacttgtaccagcgtgtggttgaattgtcacactgcacccatgatcttgcctcaaaagttttcactgactttaatatgaagtttggtaagagtatttgcagacagaaactgatgttatacacctgccacacctcctctattcctactccagaaaacagagagcaagtccaccaaacaaactcggaagatctcctgaaagtgacgatcagtgttttacaagcctgggaggagcctgtgaagcacatggtggctgcagtagctgctcttccaggtacatctgatgccatgctgtcaagagcaaaagagttggaggaaagagttttaggccttctggagggactgaagatcatactcaacaggattcatcctggagctgttgaaaatgactatactttctggtctggatggtcagatttgcagtcatctgatgaagctactcgtaacattgctttttatactatgggccgttgcctgcgcagggatacacacaaagttgataattatctcaaggttttgaaatgccgagatatccataataacaactgctgagctcaaatccttaaccactgtcatggagaaggtccagacctcaaagttccattgagtctttaccttttggttcattccttggtttaatgggcatgttattcaaaaataaacattgattctttgaaatgcttaattcaaa

SEQ ID NO: 4641 - DNA, 600 bp, Mesocricetus auratus
  misc_feature (349)..(365): n is a, c, g, or t
  misc_feature (479)..(510): n is a, c, g, or t
ataaaatccagttggacctgttactggaatttgaggacagctcaacattacagaagcatcctccaccccaagaaatggcatattcatcctgtgttttcctggccctgaagcaggatgaagcctttccttgccatcattttttgcttcttgatcctgggagttgacagccaaaggtggttccagttcatgaaagaagctggccaaggtaaggacaaaggatgggggcaggaggttgtacgtgtgaggtttcaagtacttaccagagcagggaccacataattaagggaaaacatccttgtgaagtccccatggacagagaagcagtgtctctcttcccgtgtagttctgnnnnnnnnnnnnnnnnnttgacctttttctgtgaggatccgaagcctgagatcacgtcctgatgtgtctgcagctttcccacaggaatgtaggaacaatctgtccttgtaagatgcagattcaccagccannnnnnnnnnnnnnnnnnnnnnnnnnnnnnnnacgatgaacagctcatttctatgtggctgtgagacaaagtgtatctcaaggtgctacaatattcagaccaggcacaggaacaactgtgag

SEQ ID NO: 4642 - DNA, 1400 bp, Cricetulus longicaudatus
acctatggagtcaggcccttgtttaaagccatgacagaagatggatttctggctgtgtgttcagaagctaaagggctcgtttccttaaagcactccacaactcccttcttaaaagtggagcccttccttcctggacactacgaagttttggatttaaaaccaaatggcaaagttgcatctgtggagatggtgaaataccatcactgcagagatgaaccactgcacgccctctacgacagcgtggagaaactcttccaaggctttgagttagaaacggtgaagagcaatcttcgtatcctgtttgacagtgctgtcaggaagcgcttgatgacggacaggaggatcggctgccttttatcagggggcctggactcgagcttggttgccgcctccctgctgaagcaactcaaggaggctcaagtacagtatccactccagacatttgcaattggcatggaagacagccctgatctactagccgctagaaaggtggcaaattatattggaagcgagcatcacgaagtcttatttaattctgaagaaggcattcaggccctggatgaggtcatattttccttggaaacttacgacattacaacagttcgagcatctgtaggtatgtatctaatttccaagtatattcggaagaacacagacagcgtggtgatcttctctggagaagggtcagatgaacttacacagggctacatatatttccacaaggctccttctccagagaaagcagaggaggagagtgagagactgctgaaggaactctacctgtttgatgttctccgagccgaccgaactactgctgcccacggtcttgaactgagagtcccgtttctggatcatcggttttcctcctattacttgtcactgccaccagaaatgagaattccaaaaaatgggatagaaaaacatctccttcgagagacgtttgaggactccaacctgctacccaaagagattctctggagaccaaaagaagccttcagtgatgggatcacctcagttaagaactcctggtttaagattctacaggattatgttgaacatcaggttgatgatgaaatgatggcaacagcagcccagaagtttcccttcaatactcccaaaactaaagaaggctattactaccgccagatctttgaacgccattacccaggccgggctgattggctgacccattattggatgcccaagtggatcaatgccaccgatccttctgcccgaactctcacccactataagtcagctgccaaagcttagatattctctaaactctagtgtaaaagtgttcttctcactctgaaggcagagaccgtgagacaaacacagtaatgcaaatcaaccatcaactgctcaggcttacataggcatggaaagaaataaaaaca

SEQ ID NO: 4643 - DNA, 249 bp, Cricetulus sp.
cagcagctgagagttagtcctctgtcccttgcagggagagcatcctctggacgcaggattgcctgttccatttattagctgtcagtcatgggtcagctgttttcttcacctaaggatgaacagcatgaagatttggcctccagctttacccaatattttaagaagtttaagacagtagacacaatcattcctcaggaaactctggcttcaattgggtcaagcctgacaagaggaaacattcaggtagtc

SEQ ID NO: 4644 - DNA, 242 bp, Cricetulus sp.; identical to SEQ ID NO: 1002

SEQ ID NO: 4645 - DNA, 906 bp, Cricetulus migratorius; identical to SEQ ID NO: 1003
  misc_feature (26)..(47): n is a, c, g, or t

SEQ ID NO: 4646 - DNA, 600 bp, Mesocricetus auratus
cttaccgcgcccgcctgctctccagcgccccgctcagcgagccacgtggaccaacttcggcgcgcggtgttcgcttggttccagtggggctcgccgcgcctcccgcttctcggtgctcgcctcgtctcagctccgaccccatggcggctctggtgttggaggacgggtcggtgctgcagggccggccctttggggccgctgtgtcgactgctggggaagtgggtaagcaagcccgagcggcgtgcctaacctgtccacccctcctgcacacccctctctccgattcggtggctccagctccctctcaccgctcacgaccgaagcagtcacctcctccgggatctgcagcgctcggggcagtgttccgaaggctgcccttgccagatctcagccctgcctctttcttcagtgtttcagaccggcatggtcggctacccagaggccctcactgacccttcctacaaagctcagatcctggtgctcacgtaccctctcatcggcaactacggcattccctcagatgaagaggacgagttcggcctgagcaaggtagtcacacccagtgctttctctacatcccttctcacgtcagaagttaac

SEQ ID NO: 4647 - DNA, 317 bp, Cricetulus sp.; identical to SEQ ID NO: 1005

SEQ ID NO: 4648 - DNA, 321 bp, Cricetulus sp.; identical to SEQ ID NO: 1006

SEQ ID NO: 4649 - DNA, 1400 bp, Cricetus cricetus
  misc_feature (301)..(330): n is a, c, g, or t
  misc_feature (1135)..(1176): n is a, c, g, or t
  misc_feature (1302)..(1320): n is a, c, g, or t
atctcacttttgccatctcccgtgagggccatgtatatggctttggcctctcgaactatcaccagcttggaactccgggcactgcatcttgcttcattcctcagaacttaacatccttcaagaattccaccaagtcctgggtgggcttctctggtggccagcaccatacaatctgcatggattcagaaggaaaagcatacagcctgggcagggctgaatatgggcggctgggccttggggagggtgctgaggagaagagcatacccaccctcatttcccgactgcccgtcgtctcctctgnnnnnnnnnnnnnnnnnnnnnnnnnnnnnntgtccaaggatggtcgtgtttttgcctggggcatgggcaccaactaccagctgggcacagggcaggatgaagatgcctggagccctgtggaaatgaccggcaaacagctggagaaccgagtggtcttaactgtatccagcgggggccagcacacagtcttactggttaaggacaaggaacagagctgatgaagtctttgtgggcctggcttctggcccccaacccaccttcacagaacaggaaaacagccagatgcaaattccagaaggcccctccccagccctgaacagctgtcatctcctgtcttacccatcaccaccacagaatcctttccttctgtttcgtcctcttttctagaatcatcctgagaagtacaggatgagggaggatgggaagggggtctcagaaggagtttgcttacttacgtccttacaccgttccctatattaccctacttcctgtggtcctagcaggccctggctcattgcctacaaaacccaaagcttggggtttgggtgcccatactctgaaaagttgggaactccgttcacacccccattcctatgtgccactttttctgttcctaacatcagtttaaaaggagacggatggtacagtcatcagatccagttgtcatggacctatgcctagagagatctggacaaaggcttcacaaggctggggtgaccctaagccaaatatttggctctaaacaggtgtccatgggcaaaaacagcgatccacttgaaagaaatccaactagctgtctcccaaaagcaccaaagcacccactgtctcttgggcnnnnnnnnnnnnnnnnnnnnnnnnnnnnnnnnnnnnnnnnnnggactggaaagccatgctgggctctgctgggcagtcaaggcagggtactggggaagcgtggaggggaacacttggagggacggaggctggtcctaagaaaaggaagaacagtggttgagacagtannnnnnnnnnnnnnnnnnnaattataaagtattttggaggggagagtgaaagtcttttaacactttgaataaatttagagttttataaaaatggaattc

SEQ ID NO: 4650 - DNA, 600 bp, Cricetulus griseus
taataaagatacccgaataggtttttacatcttaagagaaaaatctactaataaatgacttggagcaggtccttcacagacaatatttagtgagagtaggtagcctcatgtgggttagtagttccagttgcttcaaaatgccctcaccttttgtcataggctcatgtggaggatctactccattggatggtgatattaaaagtagcacatgggtacatgccttaagatattaagatccccaagtaaaaactgcatctcagatgctctctgtttcttgggccatgatatgggcagtgagatttctgtcacacttgccaggaaacacttatgatctgtctgtcacaatctcttatattgtcaagtacttaaccaaacacaatcacccatgacctctcatatcctcctggacttagacaggaggcacaagtctactcaggtataaatatttttacttctgatgccccacagtaacctacaatggcttcagtccagtacacaggtaagtaaacccaccaatataccattccagctgattgataacctcttagatacatcccatatgctgcagttcccaaatggagacaacccaaagtttcttga

SEQ ID NO: 4651 - DNA, 600 bp, Cricetulus griseus
tgaaatggagcgatctttacatgatgctctttgtgtggtgaagagagttttggagtcaaaatctgtagtcccaggaggaggtgctgtagaagccgccctgtccatataccttgaaaactatgcaaccagtatggggtctcgggaacagcttgctattgcagagtttgcaaggtctcttcttgttattcctaatacactggcagtgaatgctgcccaagactccactgacctggttgccaagttacgagcttttcacaatgaggctcaagttaacccagaacgtaaaaacctgaagtggattggtcttgatttgatcaatggaaaaccacgagacaacaagcaagcaggggtgtttgaaccaaccatagttaaagtgaagagcctgaagtttgcaacagaagctgcaatcactattcttcgaatcgatgatctgataaaattacacccggaaactaaagacgataaacatggaagttatgaaaatgctgttcactctggagcccttgatgactgattggatttcccttttatttatagcagtgtcaggtgcaatgtagccttgggtatctcacattaaagtacagtgagctgtccacctga

SEQ ID NO: 4652 - DNA, 600 bp, Cricetulus griseus
aatgacattttttcttcttgcagaggatgtcacccccatcccctctgacagcacccgaaggaagggtggtcgtcgtggtcgccgtctgtgaacaggacttctcaaattattttctgttaataaattgctttgtataagctattttggttctgatgtttgtttgttttgaggcaggatctctctccatgtctatgtagaagagtctggcctccaactcagatccacatacctgtctctgcctcccaagtactggggataaaggaatgcaccaccacaccccggtgaccttaggggccacccagggcaacaccaaggcagtgttttgaggggatgttaagattgcatgtaggagcttctaatgtaggttgggggttggcaaacctgggtttgcaggctggctttctgagaatgggaacctgagagaggagatgctgaggctgccactctggcattaatttgccagccagtattttcaaagtggaactgttagtagcccatgctgtcatgggacagctaaacaccacacacacacacaccccaagcagggtagtagagatcacaagttggaagccagtttaatatggtctacttggggaattc

SEQ ID NO: 4653 - DNA, 311 bp, Cricetulus sp.; identical to SEQ ID NO: 1011

SEQ ID NO: 4654 - DNA, 600 bp, Cricetulus sp.
  misc_feature (30)..(66): n is a, c, g, or t
gattccagcactcacagaacagcttgcgtnnnnnnnnnnnnnnnnnnnnnnnnnnnnnnnnnnnnncactaaccagtgcaagttggtaaataaactttaaagaggcataacaaaaaccttatctatcacaagtatatattagaaaaacgtttttagttaatactcggaagagctacagacagaactgaccaccatccctagctcaccagttttcctgggacagcacatgagtgtgcacacatgtgcgtgcacacacacccagggcatggtgggaacctaggtgcacacctgtgtgcacacagtatgatgggagcctgggtgcacacgtgtgtgtgcacacactcacacagggcatggtgggagcatgggttgggaatcctccggacagccctagggttttactttccaagacccactctatgagcagggcaggcagagggaggcctggctcagtccatccggcctgcccactctacattctacaaggctgcctgctcagctctgccctgcccctgctcaaattccaaaaccctttcagaaatggtcaacactctaaacatccccctactccacagccacagcagaaaactctaaggacct

SEQ ID NO: 4655 - DNA, 600 bp, Mesocricetus auratus
cagtccaagatgttcaatgatgccatggacattctgaacatggtcttcacgggggtgttcactgtcgagatggttttgaaagtcattgcgtttaagcccaagcactatttcactgatgcatggaacacttttgatgccttaattgttgtgggtagcgtcgttgatattgctataactgaagtgaataactctgaagagagcaatagaatctccatcacctttttccgtcttttccgagtgatgcggttggtgaagcttctcagcaggggcgaaggcatccggactctgctgtggactttcattaagtccttccaggcactaccatatgtcgccctcctcatcgccatgctcttcttcatctatgcggtcatcggcatgcagatgtttgggaaagttgccatgagagataacaaccagatcaacaggaacaacaactttcagacgtttccccaggcggtgctgctgcttttcaggtgtgccacaggggaagcctggcaggagatcatgcttgcctgcctcccggggaagctgtgcgacccagactcagactacaaccccggagaggaatacacttgcggaagcaacttcgccatagtctat

SEQ ID NO: 4656 - DNA, 600 bp, Mesocricetus auratus
cgcacaggtgcaggggctgcgggcaaatcctacctctgacctcgggcttagttctgaggaagaagagacccctcacctgggggtaatgccccattttctacttatttttaatttttaaaatttagtacagaaaactcacactctaaaattgacaagaacaaaggctatatccctctcagtgaatatacatggttggtgaagccatcatgaattcgtggaagttccagttggattttacacattccttttgaaatataattcatgaacttatccagcaccaacacgcaaaaaaaaaaggatagaaagaaaatccaagacagatatataactggaaaacaattaaccttataacctgtttcaaaactcagacctgtactcagacctttctcattcccaatatttagcctttcttgttgtcttttcgtcgtcatgctatactgtacacatacgtaaacttatttacatatctgcatacattgctgactacatatgaggaaatacaatgtagattttctacctgagattgtatgacctcacttaatatgtacatgctaagttcatccagtttcctgtgtagttttgtagttacattgtttagag

SEQ ID NO: 4657 - DNA, 1400 bp, Mesocricetus auratus
ctgctcatggaaacacatccacaccctcattgttcctgtctctagccagggtctgctgtcagttctggaaacttcctagggtcagggtcttccctggtctctcacatcttttcttgtcacaggtggaaaaagagggaactatgctcaggctccaggtaactgtggggaaccggcttgtccctaaagcctgttgagtgaagctggttgggaaacccaacagcccataattcctcctccatccacatcctctcagtaaccgcaatggtccttgtcatttcttcttctgcagacagggacagtgcccagagctctgactcctctctggagacttgaaaaggtgacactctggggtcctgggttggggctgaggaacaaaggaaaagactggtgaagggaccagaccctcacccagcccccctgctttatcagccatgacaggctgcagaaaagtcatggaggcccctgactcagcacatgttggacttgctggtcctgcccaggtcactaggaggtcagataccaatcagaagttagctggtggactctggatgtgtttaaggctctgggcatgctttatggtaaaagtggtctaccagtgacttgcaaacacatgacaaccagttgaccaatcggcacaggacagattgcccagcacagaagtgcaccaatcctgagactgttgcttacccttagacactccccttatactgcctggcagtttctctgggtccttctcatgccaactgtcctgttggacatacgatggcccctagttaatggggttagctcattaaacaacaataactgactctttgcttttgcatcggaatgggtctcttggtgattttgggggttcagaatttaagcacaacactgtgtcccaggacttctcagaacttagacatttgaatgagtcacagtgggcgtttgagatgtctttatactgactgtccatcactctttgtctttagcttcagacagtggcctcacagggacacattctcactcaagaaagagcaatgttggaagctgtctgctttctcctgtgaagagcatccagcccggtcctgtccaccaggaccctacccctgcacggccccttctacctccacagtcaaccttcctggtccagcacaggcaggaggagacaactctatcctgtcacctgcatgcttccatgagctgcacaccttggcttccccactgaaaataaaaatctggatgtgaacttgatagttcatgtccttgacctctgaaagtgtgatggagaaaataaatggcagcatggagaatcttccagaacctgtgtctgctgtggtgactgtcagcggggacaggagtctgtgggagctgagtgagatggggctgtgacaggtagagctcagtccacgtggctttgg

SEQ ID NO: 4658 - DNA, 600 bp, Cricetulus sp.
gcaacatcagccctggatacagagagtgaaaaggttgtccaggaagctctggacaaagccagagaaggccgcacctgcattgtgatcgctcaccgcctgtccaccatccagaacgcagacttgatcgtggtgattcagaatggcaaggtcaaggagcatggcacccaccagcagctgctggcacagaaaggcatctatttctccatggtcagtgtgcaggctggagcaaagcgctagtgaactgtgttaaatatttttttaatatttgtattaacacatagcatttaaccaaagttaaaaagaaagtacgtaccagaataaccagttatctatttcctgtcattatgagaagcatttagtccagtttagagttttcagagactttgtaattaaagggacagaaatagatatatcatcaaatggaaaggaatcatttaaattgcactataaaattatacaagaattaaaagtaaatgtttcataatatatacttttatttatactttctcatttgtaactataactgatttccttgctaaacaaatcatgtgtgtatcaaaaattaatgaaatgtttgtataaagtatatatagtgaaact

SEQ ID NO: 4659 - DNA, 600 bp, Mesocricetus auratus
gacacccgcatgcagttggccatggtttgctacagccctgactttgagaaacgaaagccagaatacttggagggtcttcccgagaagatgaagctgtactcggagttcctgggcaagagatcatggtttgcaggggacaagatcacctatgtggatttcctcatctatgatgtccttgaccagcaccgtatatttgcgccaaagtgcctggatgcatttccaaacctgaaggacttcttggctcgctttgagggcctgaagaagatatctgactacatgaaaagcagccgctttagctgcaaacaaatctttgcaaagatggccgtttggaactcaaaataggacttcgaagcccagacctggctccccactcctctatttcttctcacaagcccttccttcagtcaagcctctggatcctactcctgttcctttgccctgccctgagtcctgccatccctcagtgctgtttggaggaagggccagactccagaatccagcgagcccgagagatcagatctgcctgtgtgctggctctggtccccagagtgagcaacggggccctgtttgatctccagtaaagtctgaatgacacggaat

SEQ ID NO: 4660 - DNA, 385 bp, Cricetulus griseus; identical to SEQ ID NO: 1018

SEQ ID NO: 4661 - DNA, 175 bp, Cricetulus griseus; identical to SEQ ID NO: 1019

SEQ ID NO: 4662 - DNA, 1242 bp, Cricetulus sp.; identical to SEQ ID NO: 1020
  misc_feature (1012)..(1041): n is a, c, g, or t

SEQ ID NO: 4663 - DNA, 1400 bp, Cricetulus sp.
  misc_feature (378)..(412): n is a, c, g, or t
cacccttcttcgctgaccagcctatccagatctacgagaaaatcgtctctgggaaggtgcggttcccatctcacttcagctctgacttgaaggacctgctacggaaccttctgcaggtggatctcaccaagcgctttgggaacctcaagaacggggtcaatgacatcaagaaccataagtggtttgccacgactgactggattgccatctatcagagaaaggtggaagctcccttcataccaaagtttaaaggccctggggacacgagtaactttgacgactatgaggaggaagagatccgggtctccatcaatgagaagtgtggcaaggagtttactgagttttaggggtgtgcttgtaccccatgggttttctttnnnnnnnnnnnnnnnnnnnnnnnnnnnnnnnnnnnggttgggggtgggagggttggatcgaacagccagagggccctagagttctgtgcatctaatttaacacccactccacccccaagttagggagagcaggaaagccagatattggggaaggggcaacatcagctgctcccccctcccccactgagacacccttctccccacttctctgcctgttttcaatgaatttctcagcttcagtcacacccagacttatggtgtatccaagggcagggtaaggaaagagaggcccaaattcaccccagcctccacccccactccagcactggacactaaggatgaacagaaatgccaaccaccccttccatgcagtcctacttggaaagggagattttagtgacaggtacagagggctgcttgctagtgggtttttggtttctttttttttttccttttcttttttaaatattcatttaaattaagttccaccagtgcctcccttcctccagactgtccctcccctaccaaaccccctctacaagcccccaatccactctgaggccgggatagccaactgactctgtcaaggaaggaaccgggctttgaacctcgccctgagctgctagcctcccggtccttttccaggggtctcatgccaattctttggcgcatcagcccccttaagaagcccctccccatcctgggcacctcacttctagcttagctgtcagctgtccatcacctcttgctctgctccccactcactgcacccccaagtctgattgtgcttttctctcaatagaaaggtggggagctgctggggaaattaccccatttatccctgtgtttatccctctcgtaacttctcccaaacaggaggagctctcaggcctgggtgggggccccgggtgggcgaggggggccattcaacctgtgtgctgcgaaggatgagacttcatcttgaacagtgtgctgttgtaaacatatttgaaaactattaccaataaagttttgttttaaaat

SEQ ID NO: 4664 - DNA, 1311 bp, Mesocricetus auratus; identical to SEQ ID NO: 1022
  misc_feature (499)..(540): n is a, c, g, or t

SEQ ID NO: 4665 - DNA, 600 bp, Mesocricetus auratus
tcgtggtcagttctcccgtggtgatagaattcctcttcccacataaggatgggcaagattctgtgactcacacttttgaagaggatatcgttactaccatccaggcctcctattccaagaaaaagctcttcttaagccttagcgatttccagattaaaccaaagatggcctccaacatggatgaggactccgcgtccatccagagcttcctgcagttgatgatcaccacagtaggcatccccgaggtcatgtctcggctggaggtggctttgacaaccctcattaacagtaaaggcctggatcttttcgacatcatcaaccccgagatcatcagtcgtgacggcttcctgctgctacagatggacttcggcttcccagagcatctgctggtggacttcctgcagagccttaactaggagactttaacaatggaggctgatggggctgggatcaaaggcgtgcacccaactcacaatggaactggagcgtcggattgctggcatctcctgtgtggggctcagagtggggacaaggagatggggactggctccctccttcctggattattaaaggcctactcattaaatgctctgaccagta

SEQ ID NO: 4666 - DNA, 600 bp, Cricetulus sp.
gctgagcaaaggcatcgcacagagttgcctaatatacaggcttccctgggaggtacgttgacctgcataagggttacctgccccgagactccctttcccagaaaaacggcagaggacaggtcgagagtacttcgggccaagctaacagcctgatggcgactctcgtacacagtcttaatgtttgatttgggaaggttcaacctctgcctctatccctcaacatatgggtgacctatttgcttgtaaaaatataaagccttatcattaattaataaaaaaagggggatatgtagggagccggttcctgcattatccattacaataatggtgcctgaagacaccaagatgtaaattacttcacaggcgctgggtaatctccattcctttgatctctgcctatcccgtggctcatttggcctgaggagctgaagccattcatagggtaacacgtcccaggcggctggccagcctttacaagggatggttttcttggttcagtgtctctgctctggtaagcttatgcattaaagcttgtctgcagaaggatctgagtgtcctgcgtgtatttcttgctggcgagaaaatacaacccgcgggaca

SEQ ID NO: 4667 - DNA, 1400 bp, Mesocricetus auratus
  misc_feature (1161)..(1225): n is a, c, g, or t
agccttcatcttcatcgatgaaacacacatcgcccatgccttcacctggctctcccagcagcagcaggacaacggctgttttaggagctctggatatctgttcaacaatgccatgaagggtggagtagacgatgaagtgaccctctctgcctatgtaaccatcgcccttctggagagttcactcgaagacacacatccggttgtctccaaagccctggcctgcctagagtcatcctggaagacgatacagcaagagggaaatgggaactttgtgtacaccaaagcgctgctagcctatgcccttgctctggcagggaaccaggacaagagaaaggaaatcctgaaatctcttgataatgaggctatagaggaaaaaaactccgttcattgggaaagacctgagaaaccgacgaaaccagagaggtgtctgtacgaaccacaggctccctctgctgaggtggagatgaatgcctatgtcctcctcactctcctcactgcccagccagccccgagccctgaagacctgggtttggcagtgcgcatcgtgaagtggctcacgaagcagcagaattcccatggtggcttctcctccacacaggacactgtggtagctctccatgctttgtccaagtatggggcagttactttcgccagaagtcagaaaactccttcagtgaccatccaatcttcggggacattttccagaaagttccaaatagagaacagtaatcgactgttactgcagcaggtctccctaccagacatccctggggactataacatcagtatgtcaggagaaggatgtgtgtatgctcagacaacactgaagtacaatgttcacttggagaaagaggagtctgcattcactctacgggtgcagacagtacctctgacttgtgataaccccgaaggccacaacagtttccagatctcactagaaatcagttacatagggagccgtccagcctccaacatggtgattgttgatgtgaagatggtatctggcttcattccattgaaaccaacagtgaaaaagcttgaacgatcagagcatgtgagcagaacagaagtgagcaataacaaggtcttgttatatgtggatcaggtgaccaatcagacactggccttctcctttgtcgttcaacaagacatcccagtaannnnnnnnnnnnnnnnnnnnnnnnnnnnnnnnnnnnnnnnnnnnnnnnnnnnnnnnnnnnnnnnngaatacagcgccccctgcagttcagagaaacaaaacttttgaaactccaatctgtggacaagccattgctggaatccccaaaccccttcaagatggtgatttttgcctgtgtctgcaatactaattctgaacaagcatgatgaataaacgcacacttctagacagtcaggaattc

SEQ ID NO: 4668 - DNA, 600 bp, Mesocricetus auratus
  misc_feature (325)..(351): n is a, c, g, or t
cgctgtcaccgctgcacttcatagggacacagttgaaaggtgggacaagctgctgaccaaaaggctggtgaacctgtacatccccagagtctacatgtctggtacctacaacctcgaagatgtgctggagggcatgggcattacaggcttattcaccaaccaaacagatttcttagacatctcccaggatcctccacagaaagcatcaaagatagtccacaaggtcatgctgcaactggatgagaaagatgaaccgcctgttaccaccacagaggctcccccacagacaacatctgaaccgctcaccctcaccttcaacaaaccnnnnnnnnnnnnnnnnnnnnnnnnnnncacttggagcagcctgttgttgggcaaaatcatgaatccagcttagtgcatgctggagaagctatggtaccgcctgactttggggggtagaagcctttccccagtcttctccaggttcttccgaacccaactaggtatccctacttttagatatcctgtaatgtataaccattgttgctactcccaagacaggtcaactgataaagtagcactgagatagagggaactgttattaaagggtgtttttgc

SEQ ID NO: 4669 - DNA, 600 bp, Cricetulus longicaudatus
cacagaaatttggatttgaagtggggccggcttgcttcctaggttaggagctgctgagcccacggtcttcagagcaacctcgtgacctcagcaccccacctgtgggtgtcctgtgcacggcccatcctggacagtgaacatttctcacccctgcctgcctgactcatctgtgcctcggaccctccgtggcattggaccccacaccaatgagaacaaagggaaagagccgtgttcccacggagccgaatcacatgacctagccacaccacagcctcttgccacactgcaggcctggtccccagctctcctaataggttcatcaaaggtgttcgtgaactgttggccgggagtcagggtggggcagtatttggaaatcactttaaaaaaaccaacttgaaaatatgtattccccttgaccttcaaaagatgttctaaggtggtcttgtaaaggtcgccaaagccttctctttttttgtttttaaacaaccctcaatacatccactcagaggccaaatgtcattccacgtgtgcctttccgatggattaaaggtgcttatgtttttgtgagagttttaagtaaatatttgtattgtattgtta

SEQ ID NO: 4670 - DNA, 600 bp, Cricetulus griseus
aacgtacagctctgttgtgttggtatctctgtggagacagaaatcggtggggagcgtgggggctggaggagccagggtgtcgagccactgcttacggtataggggtttgctctacagatgactaaaatgtctgggaactaaagctaagtcatatttgtagttcttgcactggagaggctgaggcggaagaatttcagagagttcaagttcaagtgaataccaggatattcaagcacataaaataataataataaataatcaaggaagaattggggctaatgttttgcaagtttttgttctcttccatcttatcgaagtaggaaaatcctagctataaggtaaggtctgctaatcagccaatgggagcagctactgtcaatcacaaaaccccacctacctctccaggaaggtgattagtcctctgagagtcaaggcatgccttgagtctcaaggagcaagaagtgtaccaagccctaagttagggcaccttgccaggaagcctggtctgtcatatccccaatgtctccctgtccagccagaggacaagtagtcctaacatggccactcagctctgcaaaccagagctcccagaaggaattc

SEQ ID NO: 4671 - DNA, 600 bp, Cricetulus griseus
  misc_feature (413)..(434): n is a, c, g, or t
  misc_feature (452)..(465): n is a, c, g, or t
  misc_feature (467)..(479): n is a, c, g, or t
gctgtgctgtcattttcagatggcggaagccggcttcatccactgccctaccgagaacgagcctgacttggcccagtgttttttctgctttaaggagctggaaggctgggagccagatgacaaccccatgtaagtccctggtgccccggttccaatgggaacttactgggttgaactggagttggggggaaaacgatttgaatttagtaggagagcatggtcttcctaactcgttacgtgttccaggctgtccttgaacttgttatatacctaagactagtcttgagttctccatatctgcctcggtttccctagtgctgccagcttgcatggttttgcctgaggtatttgttttgatttttgtttgtttgggatgggtttctctatgtagctctggttgttcaagaactttnnnnnnnnnnnnnnnnnnnnnnaaactcagagattttcgnnnnnnnnnnnnnncnnnnnnnnnnnnngtggtgtacgccaccacggcctggcctgcctgagatattttaagattcaggtgtttgtttgttttggctaatatgccacatgcatgtcttcatttctgccaccggtgtgggtgtcggatcc

SEQ ID NO: 4672 - DNA, 600 bp, Mesocricetus auratus
tggttttctgaaaggctgatagacaattcctgatgtctcagaatctactgattttgtctgtccttcatggaagattgtttctggctaaaaaggctaaagaagcctgtgtagacttgctggtggactgtttagaggaggggtgtggggaaaggaacttagattcatccaatcacttcaccttcaagggggatagtgaggacccagataatgagttgttgcattcatcaaaatcattgtcacactggagtagcagggcacacggcgcagctgaactcaaggctgccctggcctgctgagtaagaccctgtggtggtttgaaagaaaatgacccccaaaggaagtgcactaatagaaggtgtgatcttgttggagtatatgtggtcttgttaagggaagtttgtcactgtggaggcaggctttgaagtctcatacatgctcaaggcatgcccagtgaggtagaccacttcctgttgcctgcctatcaagatataagactcaactccagcaccatgtctgcctccatgccaccgtgtcacacaatgataataatggaccaaacctctgaaatgtaagccaccccaattaaattttttttccttt

SEQ ID NO: 4673 - DNA, 148 bp, Cricetulus longicaudatus
gctgacccggcacatcagaatccacacgggccacaagccctttcagtgtcggatctgcatgcgaaacttcagcagaagtgaccacctcaccactcacatccgcacccacaccggggagaagcccttcgcttgtgactattgtggccgc

SEQ ID NO: 4674 - DNA, 413 bp, Cricetulus longicaudatus; identical to SEQ ID NO: 1032

SEQ ID NO: 4675 - DNA, 600 bp, Cricetulus longicaudatus
  misc_feature (324)..(373): n is a, c, g, or t
ccaatgattgtgagctcccacgctggcacatgcatgacttcttccactccttcctgatcgtgttccgtgtactgtgtggagagtggatagagaccatgtgggactgcatggaggtcgccggccagaccatgtgtctcactgtcttcatgatggtcatggtgattggcaacctagttgttctgaacctcttcttggccttgctcctcagctctttcagctctgacaaccttgcagccacagacgatgataacgaaatgaacaaccttcagatagctgtgggaaggatgcaaaggggaattgactttgttaaaaggaagatacgtnnnnnnnnnnnnnnnnnnnnnnnnnnnnnnnnnnnnnnnnnnnnnnnnnncaaaccccttgaagatctgaataacaagaaagatagttgtatctccaaccacacgaccatagaaataggcaaagacctcaattacctcaaagatggaaatgggacaaccagtggcataggaagcagtgtggagaagtatgtggtagatgagagtgactacatgtcattcataaacaaccccagtctcactgtgaccgtgcccattgcccttggagagtctgactttg

SEQ ID NO: 4676 - DNA, 598 bp, Cricetulus griseus; identical to SEQ ID NO: 1034
  misc_feature (395)..(448): n is a, c, g, or t

SEQ ID NO: 4677 - DNA, 600 bp, Mesocricetus auratus
  misc_feature (547)..(561): n is a, c, g, or t
ctccagcagcctggtgttgtaccagagctcggactccaccaacgggcatagccacctgctgccatccaaccatggtgtcatcgagacttttatctccacccagatggcctcctcctcccagtaaccatggtgatggcctctcaggagctgggttcccagagcccacactgcctgcatagggggtgagaaggccaaggccatgctgcctggaggacatctgcgactgccatgtgtctcctgccgtaggctggtggccttcccatacacccccgctttcaccccgacttctccagcagcatcagagagggatggctctggggggagtctcaccctgagaagggaccataaagggcttgaggacagcccggtctggacagcgttggaagaccatcctcctgcagagaatagggaactcgacacttgggacaaaggggagcctgtgatgctggtacccacacaggatctctgtgttgagcttgggggcctagatccacatggctgcctcctgtctcctgtgcaaccccaggccatcccacgagcaccagcnnnnnnnnnnnnnnnacatggctgtttggcggtcacctaccccagcccagacag

SEQ ID NO: 4678 - DNA, 1400 bp, Mesocricetus auratus
ggtgaattacatctactttaaaggaaaatggaaggcgccctttgaccctgatttcacatatgagtctgacttctacttggacaacaagaggtctgtgaaggtgcccatgatgaagcataaggacctgaccacaccctacttccgggatgaggagctgtcctcctatgtggtggagatgaggtacagaggcaatgtcagtgccatgttcatcctccctgacaagggcaggatgcagcagctggaatccagcttacagccagagaccctgaggagatggaaggactctctgagacccaggatgatccatgagctctatgtgcccaagttctccatctccactgactacagcatggagggcatcctttcacagttgggcatcaaggaagtcttctcctcacaggctgacctgtctgggatcacaggggacaaggacctgagagtctctaaggtcgtccacaaggctgtgctggacgtgggtgagacgggcacagaggcagcggctgccacaggcctcaggatgatgggatcagctctaattatgaaccctctgagactgcgtttcaacaagccgttcctgatgattatctataacacaaacactcagactccactctttatggccaaagtcacaaatcccaagcaaaactagaacatcccaagtgctgaggcttcttcccaggagccagggattaatcctgtatgagagtatctatctgcatttttgcttccatgctctgattggctgtggcatgcctggattggacaatgacagtaactaactgtatgactgccacatgcacagagtcctggggacagtcagtgtcaggctcccagtcctcttggcagcactagctcatattcctgaagctgaaatctatccttgtggccactccttcccgccactattttatctgcctctacacaaaagcctgggccctggaaggtaggctcacccctgtctaggctcttgttatgtctacattcagcttccacagccttcatggaatcatgcaaacttataggtgaaccatgtgtccctcagccccaggacacagaagggaacccgctaccatgagtctatttccagcatctggggaccagttggtgtccagttcctgcctcacacctttcctcttccattcactgtcccttcaggggatcctcacacttcccacatctggcacagtgttggagccctcactcctgcagctgcatggagcctgtccttcagatcagctcccttctcccttctatacctacttagggtagaggagcctttctctagtttcctaatgaccacactcacagaacagaaagactcctcttctttccttacccaaactggagggcttgaagcaaaagatcaataaacataactgcatgaaaagtgaaaaaaaaaa

SEQ ID NO: 4679 - DNA, 408 bp, Cricetulus sp.; identical to SEQ ID NO: 1037

SEQ ID NO: 4680 - DNA, 117 bp, Cricetulus griseus; identical to SEQ ID NO: 1038
  misc_feature (31)..(56): n is a, c, g, or t

SEQ ID NO: 4681 - DNA, 429 bp, Cricetulus griseus
cggcccgagaacaagcaccgggtggggccggcccgagaatgagcaccaggtgggccagcccgagaacgagcaccgggtgggctggcacgagggcgagcaccaggtgggtcagcacgagaacaaacaccgagtgagccggcctggagctctgcccctgagcccccgccccgcccgaagagaaacactccgtcccaaggtctccgcccccaaggtcaggccatcaggaagggggggggggaattgagtctgctgtaccagacaccagaccttgagaatatgctgatctggaatggctctgtgtctcatttgaaccatccaatagaaataattctgtatttcgcctcatttgaaagactctgtgtttcacctcatttgaataactctgtacttgcctcattgaataaccctgtatagcgcctcatatacatt

SEQ ID NO: 4682 - DNA, 425 bp, Cricetulus griseus
  misc_feature (370)..(390): n is a, c, g, or t
tacgttatgctctgatttgaaatcagctgtctttctttttcagattagtgatgatgaaccaggctatgacctagattttgcccagcgatgatggcagacacaaaaacccaacctcatctttggaggttctttgcctcatagcattaaattggggcttttttttttcttaccttataggtcctttgcatatatattatagcttccagatttgtgtttttatgggattttgtgtgtgcaaatgcatgtgtctatatgtgtttcttgtgctttttctttgcctccttttcttgtttgtggtttattctgattggaaaaggtgtttattcctcatggagtgattatggacaggtaagtaagatcttaattgaannnnnnnnnnnnnnnnnnnnncggttaagagcactgactgctcttccagaggttct

SEQ ID NO: 4683 - DNA, 1400 bp, Mesocricetus auratus
  misc_feature (456)..(501): n is a, c, g, or t
  misc_feature (579)..(609): n is a, c, g, or t
  misc_feature (933)..(964): n is a, c, g, or t
  misc_feature (1091)..(1107): n is a, c, g, or t
gactcatatggtggtggttttgatgcaaaccagtctttggtaggagacattggagatgtgaacatgtgggacattgtgctgtctccagaacagataaacacagtttgtgttggtgggacactagaccccagtgttttaaactggcaggcactgaagtataaagtacagggtgatgtgtttattaagccccagctgtggccctgacctactgttgtgagccctgagacaacccttgggattacattgtcttccttgtctctggttatagaccttttaaccccaacagatgctgtagttctattctgtgaatatggtctttcacttccctgctctgcctttcctcagcaccagagcatgcaatttaagtgtatggcttggcagtatgtacatcatattaggaatatttatcaaagagaatcctaattacatgtttttgtttatatacacactataagnnnnnnnnnnnnnnnnnnnnnnnnnnnnnnnnnnnnnnnnnnnnnnatttccaggtgtaacagccccggctgacctggaacttgctgtgtagaccaggctgacctcaaactcactgagatccannnnnnnnnnnnnnnnnnnnnnnnnnnnnnngggcctgtgctatcactatctggattttttacatatatttttaattgaaagaattttaaacaatccctcaccctcacaaagatgagaaaccacacagaaagaagaatgaaaattttaatttaatctttttgtttttaaaatttcatatatgaatgctatatttacttcatttatatccctccctctccaaatcttcctgtatcttgacctcttatttattagctttatatgcatacacatacattatatacacaatatctatcatctatgtatctatgtatgtaagtacaatgtatctatgtgtctatgtatctatgtatctannnnnnnnnnnnnnnnnnnnnnnnnnnnnnnnctatcattcatccatcctactggttccatttagtgttgcttgtacgctgttgagggttggtcacttgggacttggataatctattagatggcacacccctgaagaaaacggactctccttttctcannnnnnnnnnnnnnnnngtagctcttcatataggggtggggctttgtgaaatttcttctgtccatgttgcatgctagtgttgtcattatgtaggtcttatttaggcaacccagactgatgggggaccgactatactgggctcagagttagtccttttctggaataaaaatctgtatctgaacttcctgggtccatgagtcaataaagctacctttggtttggatgaattggagttattgcatgattcattttattatcaaccctctggaataaatagtctgaagttcaggctgactgtcacttccctgca

SEQ ID NO: 4684 - DNA, 312 bp, Cricetulus sp.; identical to SEQ ID NO: 1042

SEQ ID NO: 4685 - DNA, 866 bp, Mesocricetus auratus; identical to SEQ ID NO: 1043

SEQ ID NO: 4686 - DNA, 809 bp, Mesocricetus auratus; identical to SEQ ID NO: 1044
  misc_feature (358)..(380): n is a, c, g, or t

SEQ ID NO: 4687 - DNA, 571 bp, Cricetinae gen. sp.
gctttccggtgctgcccctgggtgacgcccactgaggaagacagactggagctgactcgcactccatccctctccaggagagtcaacaggtgtcacacaaaagagactttgttcatgactgcggacatgacccactctgaggctaccaatggccaggttgggagtccccaagatgtggagcctgccgcaccctgaagtcttgagactgtctgcagggccaggcttagtccctttgagaaacagctgatagaaaaggcctgatgtaatagcttgtcccacactccattcttcaaccaccaatagaaaaacaagatggtgcctggagctccacaggcaatgctaatacaaagagctcacatacccaccataagcattcctgggatggaggaaagagccaggaagacagggagccaacacttggccaatctaggagctgcaaagtgaaatgtctccctgcagtataaagatggatgggaaaactggatctcattaaagataactgcaggtgtcatgagaagaggcagttgaagggatgatgagatggtaaaggcacttgctgcctagcctggtg

SEQ ID NO: 4688 - DNA, 540 bp, Cricetinae gen. sp.; identical to SEQ ID NO: 1046

SEQ ID NO: 4689 - DNA, 600 bp, Cricetinae
tgcgcggcccctgcaaatggcagccgagcccatctccgctaggcagccagccctgcggcctcacgtccacaagcagcctgagaagaccacccgcgtgcggactgtgctcaacgagaagcagctgcacaccttgcggacttgctacgccgccaaccctcggccagatgcgctcatgaaggagcaactagtggagatgaccggcctcagcccccgagtgatccgagtctggtttcaaaacaagaggtgcaaggacaagaagcgcagcatcatgatgaagcagctccaacagcagcagcccaacgacaaaactaacatccaagggatgacaggaactcccatggtggctgctagtccggagagacatgatggtggtttacaggctaacccagtagaggtgcaaagttaccaaccgccctggaaagtactgagcgacttcgccttgcagagtgacatagatcagccggcttttcagcaactggtcaatttttcagaaggaggaccaggctctaattccactggcagtgaagtggcatcgatgtcctctcagctcccagatacacccaacagcatggtagccagtcctattgaggcatgaggact

SEQ ID NO: 4690 - DNA, 600 bp, Cricetinae gen. sp.
gacgccatcagagccaactcaattgagctcaccgctgggagtgtagacacgacaaccttccccctggtcatggctctctttgagctggctcggaacccagatgttcagcaggctgtgcggcaggagagcctggcagctgaggccagcgtggctgcaaatccccagagggctatgtcggatctgcccctgctgcgggctgtccttaaagagaccttgaggctctatcctgttggtggctttttggagagaattctaagctcggacttggtgcttcagaactaccacgtccctgctgggacattggtcctactttatctctactccatgggccgaaaccctgcagtatttccgaggcccgagcactacttgccccagcgctggctggagaggaatgggagtttccagcacctgaccttcggctttggggtgcgccagtgcctggggaagcgcctggctcaggtggagatgctcctcctgctgcaccatgtgctgaaatccttcagggtggagacgcaggagcgagaggatgtgcggatggtgtaccgctttgttctggcgcccagctccagccccctgctcactttccggcctgtcagctag

SEQ ID NO: 4691 - DNA, 292 bp, Cricetinae; identical to SEQ ID NO: 1049

SEQ ID NO: 4692 - DNA, 1217 bp, Cricetinae gen. sp.; identical to SEQ ID NO: 1050
  misc_feature (577)..(595): n is a, c, g, or t

SEQ ID NO: 4693 - DNA, 600 bp, Cricetinae gen. sp.
tcaacctgctctctgggatgtaacctgcctcagattcataacatcagaaacaagagagccttgacactcctggcacaaatgaggagactctcccctctctcctgcctgaaggacagaagggactttgcattccctctggagaaagtagatgtccagcacatgcagaaggctggagccatccctctcctgcaggagctgacccagcaggtcctcatcctcttcagctcaaaggactcatctgctgcttgggagacaaccctcctagacacattctgcactggcctctaccagcagctcagtgacctgaaagcctgtctgattcaacaggtagggattgaggaacctcctctgagccaggaagactccctgttgactgtgaggaaatacttccacaggatcactgtctacctgagagagaagaaccacagcccctgtgcctgggaggtggtcagaacagaagtctggagaaccctgtctgccacagcaaacttgctggcaagattgagtgaggagaaggagtaagtcctgagccaaagtgaacagaactctcctgaactaggacactgcacctcactcctcagattctccaggccagaagtc

SEQ ID NO: 4694 - DNA, 171 bp, Cricetinae gen. sp.; identical to SEQ ID NO: 1052

SEQ ID NO: 4695 - DNA, 404 bp, Mesocricetus auratus; identical to SEQ ID NO: 1053
  misc_feature (117)..(140): n is a, c, g, or t

SEQ ID NO: 4696 - DNA, 249 bp, Mesocricetus auratus; identical to SEQ ID NO: 1054

SEQ ID NO: 4697 - DNA, 534 bp, Mesocricetus auratus; identical to SEQ ID NO: 1055
  misc_feature (182)..(239): n is a, c, g, or t

SEQ ID NO: 4698 - DNA, 146 bp, Mesocricetus auratus; identical to SEQ ID NO: 1056

SEQ ID NO: 4699 - DNA, 600 bp, Cricetulus migratorius
cagtcactgtccctcagttgctctgtcactggttactccatcagcagtggtaccttgtggacatggatcaggcagttcccagggaataagctggtgtggatggggtacataggctatggcgggggcacggattataacccatccctcaagaaccgcatctccataaccagagacacgtccaagaatcagttctcccttcagctgaagtctgtgaccactgaggacacagccacatattattgtgcaaaaatttttgggttcaatgctttggattcctggggccaagggatcctggtcaccgtctcctcagccacaacaacagccccatctgtctatcctttggcccctgcctgtgacagcacaaccagcaccacgaacacggtgaccctgggatgcctggtcaagggctatttccctgagccggtgaccgtaatctggaactctggagccctgaccagcggcgtgcacaccttcccatctgtcctgcattctgggctctactccctcagcagctcagtgactgtaccttccagcacctggcccagccagaccgtcacctgcaacgtagcccacccagccagcagcaccacggtcgactta

SEQ ID NO: 4700 - DNA, 577 bp, Cricetinae
tttatttgttattctttaatgatccacatgaacagtatttattacgtgttaaggtcttgggtctttaatgtgaagattttcttttaatgcttctaaaattctgttttatatattaacttacactgtgtgccaagtgttttaaaggtttatttgccaacgattatgaagaggaacattgatgtatctgagctgcttgggtttttgaaaggtcacctggatacttgagttgcatcatccctgtatttaaattgagctttaataaattgcttcagtccaaaaattacaggaaaggtgtattcttaattgatgaacgaattgatttctttttcaaatggggacctatttgcattccaaaaggggaaaaccatcacagagatagatcttgtaactgagaacctgctaggcaaatatattttccaggttgtgctgtgctttttgaaaggcctaatttaattgattttaatatagatgtacatatataagttattctaactgtgaagacttactacgttaaaagactgctttgattcgcttatgttgtgaaatcatttgttatttttctaaaaaaaatctaaaa

SEQ ID NO: 4701 - DNA, 600 bp, Cricetinae
tgctgcagccgctgtggctgcaggcctgggcctggaggcgggccccaaagaagaggcgggcatcattcggatgctggagtttggtagccatctggatctggagcgcatgcaaggcaccctcccgctggacaatatctcctaccgcagggagtctgccatctgacctccaggccctgccctcctctattcctgcaagagcctctgccacgggtggggatccaggacaagcctcccactctcaggacagagttggacccggaggaaggtgggggcttcaaagactgggagatcccttcccgttgactgcagagcccaggactgggaaggaaggacccaggtactcagccctgctggcctgagccccgccccccagcacctccccacaggtggctctgggcccccagaccttccaccctttccccactgacccttcaaggatgcgtcccttctgttctcaggaccttggggaaggcggctggactgctggggggtgggcatcatgggagttctgggtgggcagggtgggcctggggagggggaggggtgtgttttttttgcatgaccatggtctgtgcccttgactcccttttgtaaatatct

SEQ ID NO: 4702 - DNA, 600 bp, Mesocricetus auratus
gaggacacaaaaggaatcaagttaccggacagtgaccaggaactgtaccgcaactttcctctcaccatctcggagcggtggcagcaggaggtggcagagactgtttttgacaccatcaatgctgagacagatcggctggaggcacgaaagaaagccaaaaacaagcagctgggccatgaggaggactatgctctgggtaaggactgcatcatgcatggctacatgtccaagatgggcaatcccttcctgacccagtggcagcggcggtacttctacctgttccccaaccgacttgagtggcggggtgaaggcgaggctccgcagagcctcctgaccatggaagagatccagtcagtggaagagacgcagatcaaagagcgcaaatgtctcctccttaaaatccgtggaggcaagcagtttgtcctgcagtgtgatagtgaccctgagctggtgcaatggaaaaaagagctgcgtgatgcctaccgtgaggcccagcagctggtgcagcgagtgcccaagatgaagaacaagccacgctcacctgtggtggagctgagcaaagtgccgctgatccagcgtggcagtgccaacggcctctga

SEQ ID NO: 4703 - DNA, 600 bp, Cricetinae
ttccggcctgtcagctagtcagtcagctttgcagctggggttccagtcaggccagcagctccctcctgtcctgatgacaagctgccctcatttctaccttgggccaccatgcctgtagccacagctaccttcttgtctaggctctggaggattactgcccctcctctgtcagtcccttcacccccagcctccacctcaactgtgatcattcaagtgagcccatatgctggctttgctttcctctctggtcccaaaaatccctgtcactctcttcctgaaccctctcttaaagtttcttcgtatggtttgcacattgtcgaatactaacccagcatcagcaaggacatctcatgtcaacagtgaaagcccaggattcactcatgacacattctcatgcctgaggagagacagaactggccaagtgtatgctgcacaccccagacgtcatgtggtgtggcggagtcaggggcgcagtggatgctccctggtcagcttccattccagacattgtgccgatcttgaggatgctgagagggctaagggctcaagaatggccaaacaaaacggaaacaaacaacacacataaaagcccaacaaaca

SEQ ID NO: 4704 - DNA, 600 bp, Cricetulus griseus
ctgaaatttttgacaaaagtgggacttatccatagagttcaaacttattcttgggaggaaaactgaatttacatagatagatatgatcaatcatcactaatatattatcagaaaatatctaaagacctaactgaatgtagatcagactggaaaccttgttatagtatgctgaattcagaaacaagcacttttatatgttaaaatataacagattattattataaaatgttgattttcttcagtatttatgattgtaaaaagatgtgaatgaatgtattcctttaatattttaatcatcagtttgagactctgcaacctatttatttgtgatgtttacactatactctgtcaagtgtctgtctttttactttagaaaagtggcttctttcagtgatattccaaaagcagaagtgagataaagattactaatgaattcaataacaaatcagaattgagttaaactcaccacggatattttacatccgttcacatacttctatggtccaccaatgaccactatatctttcaaggaaaagacctcattagaacagtttatatctggcaacttagtttgttgaactctagagatgtttactaaag

SEQ ID NO: 4705 - DNA, 600 bp, Cricetulus griseus
ccaagaagagcccgtgttggggtcaactgtgcccaccaggccagcccgccttagccccaggaagctcaggacaaatcatgtctgtcctcagggctggtgaggtagcccagacaccagccaaggcacactggccctgcgggtgctggtccttctatgtggggtggatgcctctcctggcttctgactagttgtcatttccaccattggaggtacttgcttggatggctatctgatctttttttaaaaaaaaactaaaacaaaactgacattaaaatggacaactacatttggcttttctgttgtgaaaagctggagtcaggtgggcgccaggcacatttccgactgatagagtagcggtaggcccttttcgcctgcagacgccatccccgagcaagttagtactcacctgacacacattcaggcagcatgggtgtaccagccttgattggaaccaaggcccttctagaggggaatgcctcaggggcttgcactggggagccatgtgagagttaccagagtcagctgtgaggttaagactagctgtggtgtgagcactttttccaatactttataaacagactctgttaaaaaaaaaaaaaa

SEQ ID NO: 4706 - DNA, 600 bp, Cricetulus griseus
gctgccgaggccgggccgggtggctccggggtcccgggctgggggccgggcgagcgggcgagcgggcgggcgggcggagcgagagcaccgggcaccgacgcgtcgccttcgccgccaggctcaacgtggacgggctgctggtctatttcccgtacgactacatctacccggagcagttctcctacatgctggagctcaagcgcacgctggacgccaaggtgggtgccggggtcgccgacggctcgacggctcgacggctgcctgcgctcgccgccttgcacgccctccccgcctccctcaggctaacttcctggtctggtctggtcgggggaggggggggaacccgggcacgttggccccaggcctgcaatcgcagcagcaccctgggaagcgcaggctggagcatcgctgcaagtttggaggccagcctgggctacacagtgagaccctgtgtcagcaacagcggcacaaataagtagcagggctgggaatgtggctcacccggtagctagggtgcttgctagcatcatggatctgatgctccccctttcatcctcgccaccgcgtaaactgaacgtgacggtgtgtgtctgcaagctt

SEQ ID NO: 4707 - DNA, 600 bp, Cricetulus griseus
atctcccagtcccagagtacagtctttaattgcagggaggacagcaggatcccgatccacaggtgccacccacccttcccagttcctgagcggctgtggccactgcagccagtccacttatcgagggctcaagtcctgggtgctggcgctcatggtccgcaaggcctcactcaatttccgggttgagaactgggggcaggtacaggaacggtcagagttcttttccagttgacactgggatcgtgtcgtgcctctgccctccacccccgactggaccccatcatgagtgccggggaggaagccccacctttcctgtcgagcctgtcagcagcaccctactccaccaccggcccctcacctgcggcctggcagccctcgggccttccacattcagcatgttgagtgacacggctctcttcatccttcagaggccgagaggacagagtgagtcaggaaggcctgcagggccctggctctgaccagtgtcgcagacgggctgctgagctcacccagcactcaccctgcagcgcccgccatgctctcccctcggaggcgcgagaccagcttctcactcccccgccggatggactctcgaagctt

SEQ ID NO: 4708 - DNA, 1400 bp, Cricetulus griseus
tcatgcagagcatcatgcagaacctcctgtctaaggatgtactgtacccgtccctgaaggagatcacggaaaagtatccagagtggctgcagagtcaccaggagtctatccctccagaacagtttgagaagtaccaggagcagcacagcgtcatgggcaaaatatgtgagcagtttgaggcagagacgcccacagacagcgaggctactcacagggctcgttttgaggcggtgctagatctcatgcagcagttacaggacttggggcatcctccaaaagagctggccggggagatgcctcctggcctcaactttgacctggataccctcaatctatcgggcccaccaggtgccaatggcgagcagtgtctgatcatgtgaaacacaacacgttttcctccctgagtcccagacctggggaacatctggagtcagcagaactattgggaactgaggcaggaatgtcgtctctgggagctggctgccccacactctccatcccattcaagactgtgccctgccagctgcggatctgctgaatctgctctgtaggccatttctgtgagccttactccatcatgtgttctgctgttagaaacaggccagctcattgccccgtaaaggaagacatcacttcttcccactcccaaaaataatggtctatatggctgtactcatgttcccctttattcccagggacttcgtgccttgtttctactccctctcttggatctggggagcaggagctgagtcctaagactttgtgtttgtttctattaggcagggcttctgggaatgaggagaaaatgtagcttaccctggggctgtaggtttgtcaccacatctccttgccttcatttcgagctctctgaagggaaaggaatttgcacttaacctgtggtcaggttggaagagaagccctgggcttttcctgtccctaggtgctgcccacttaattcccctttcttcctgagaactcaagttgctacctaccttggttctttcaacagctctggtttgggtgaacccagctcttgaccttccttggccccttgactgtcctcttacctcctctcgttttagattcttattttactccagcccctctgaaccactgtgactgatgaaggccaatcttgttccctttcatctactcctgtgtcattctcttcccttcccttccctagacccttcccttccctggccaacacgtaattgtagtgtcagagctggtaaatgagtggccatgctacccagatacattctggcttacttgagacatcagattccctagaatccttggttcaggaagatgcttgggaatggggtgcagcctgagtcttttttcctgcaagccccaggggacagtatctaataaatactctgagcgcaaaaaaaaaa

SEQ ID NO: 4709 - DNA, 600 bp, Cricetulus griseus
ccttctgcttcctcagccatgaccatgggagcacatgggagctgggccactttgtgtcccagaactcgctggagtgccaggtggctgaggttggcactggcgctgagagggtggtctatctcaatgctaggagctgcctgggagccagggtccaggcacaaagtcctaacagtggcctggatttccaggacaaccaggtagtgagtaaacttgtagagcctcccaaaggctgccatggaagtgtgattgctttccccaaccccacctcaaaggcagatgccttagatgtgtggctgctctatacccaccctacagactcccggaagaggaccaacctgggtgtgtacctcaatcagaagccactggaccccaccacctggtcagctcccaccctgttggcaacaggcatctgtgcctactcggacttgcagaacatggggcacggccctgatggctccccgcaatttgggtgtctgtatgagtcaaataactatgaagagattgttttcctcatgttcaccctgaagcaagctttcccagcagtgtttggtgcccagtgatcttgctgcatgcggcccaaagtgcttcaaaacccccccg

SEQ ID NO: 4710 - DNA, 600 bp, Cricetulus griseus
  misc_feature (442)..(457): n is a, c, g, or t
ctggagcctcgacccacatggcgggagcacacagaggccttgctgctggcctcctgctatctgccacctgccttcctgtcggcccctggacagcaaatgagcatgttggctgaggcagcacgcactgtagagaagcttggtgatcatcggctactgcttgactgccagcagatgcttctgcgcctgggcggtgggaccactgtcacttccagctaaaccttggatggtctccccagtattagaggcccttaaggacctttgtcactggctgtggtcgtccagagagggtgagcctgacaagcaatcaggatcatgccgacctctagtgacaaatctagaaattgcagaggctgcactggcccaatgccaccctcttgctctgtaggcacctttttcctgtcctatggaaaggaacctttcccctagctgagggccaccctgnnnnnnnnnnnnnnnncactcctggaagacttgtatatagtgtagatccagctgagccagtttcctgtgcaggctcatgtactactttaacttttgcaaactttattttcataggttgagaaattttgtacagaaaattaaaaagtgaaattatttata

SEQ ID NO: 4711 - DNA, 600 bp, Cricetulus griseus
  misc_feature (233)..(274): n is a, c, g, or t
gtaacttatgaagtacataacacaagtgtatcacttgtaatttctgaaataagattacagaagctgaagaattagatggtgtgtgcttctttacaaagaattcctgacaaataatgccattaagtgacagctaatgatgaattgtggacttagtcagatgatcataccgacagaaactacatgaagagagtacatgcctgagccaaggtgaactctagcatcacctataagannnnnnnnnnnnnnnnnnnnnnnnnnnnnnnnnnnnnnnnnncatcacctatagaactactatgagctgcagttgacattcttcagtccatcctgatatggtctctgttactgataactccaggtctttggtaatgactgtgaaccagaaaactcagaagtagcacccagatttccagcccagacaaaacataacatattaagtcactgaggtttgggaaagatttttagacatccatgggtagcttatatagttccttttaatcagttgttgaaagtagtctcaatattcatatagtagtcgtttcattgtgtgaccaaatttatagacaatgttctcacctttgttattttcgttgttgtttctgg

SEQ ID NO: 4712 - DNA, 600 bp, Cricetulus griseus
  misc_feature (117)..(154): n is a, c, g, or t
  misc_feature (509)..(536): n is a, c, g, or t
caaagctgggtatggtgtcgcacacctttagtctcagcattagggaggcaaaggcaggcgcatctcagtacaaggccaccctgatctacagagggagttccaggacagctggagatnnnnnnnnnnnnnnnnnnnnnnnnnnnnnnnnnnnnnnattttcaaaacagggtcacacactaagttgccttgaactttcttagcccaggcaggccttaaactggtaaccctcttatcccagcctttcaagtagttggaattatagacctgtgctactaggtcttgcctattcagatcctttcattcctcctgtgctcttttctcaaaaaaagatgcaaacctccttccctaggtagcactatctgattctgtttccccaggaatcctatactatgtctacatgggactgcttgcggtgttctgtaccaatgccatcaacatcctagcaggaattaatggcctagaggctggtcagtcactagtcatctctgcttctatcattgtcttcaacnnnnnnnnnnnnnnnnnnnnnnnnnnnnagagataggaagaaacagacacctgtgtgttaagaggattgcttggtgtggatttagagaattc

SEQ ID NO: 4713 - DNA, 600 bp, Mesocricetus auratus
taaacccattaccccaactgcacattggtcttgtgagaagtgactatcatttgtctgtgggtgttcacggcaaaggctagactgagagaccgtgccatcacctgctatgacagaataatcactggcttctttcccctgacccaggctaaaaaacattttatttaacaatttgtatgtaaactcttaaatgagcaaatgcaaagaaacaaaattagatgcaatgacaatttggtcctgttttatatgtacagaaagtgaacgccacaatggctaattagttgatctaaatttgctcaagagttgaaacaacagaagtgagattaacaccttttcctcatctcctatccaggattccagcaagagcagaaagaacttcgaactctgtcttgcacacccttcaccatgaccatagtaggaacctccaatagctgatgagtgggtgaatggcatggataaattaactcacttggcaatcagacaatccagaagggtaccgtgttactatgtgaattctcaaaacacttgatgaatatttcacaataacaagctgtttgattcgttattcagatatcaaaaatacaagtttcactttctagttga

SEQ ID NO: 4714 - DNA, 1000 bp, Mesocricetus auratus; identical to SEQ ID NO: 1072

SEQ ID NO: 4715 - DNA, 1400 bp, Mesocricetus auratus
aaccagcattgctttctgaaatgagggcccaaagaatattccattaagattttgactcttccagctccttcctagaggtcttgcattcccaagggatgctatggacggcttcgatcaaatgcatattcttggtccctattgaatcttttccctaaactaagtcccaagtaacagtcaccagccagggacttaccccagggcttagaggtattggtctctgggaggaaatttgaatgggtccatattgcctctccacaagtccagtccttgggtattgttttccagttgggtgggagatcaggtgtactggttacacacctttttatagactcccctttctgctggaaaattttcagatgcttctgagagatccccaaagggtgaagctatttatctgtagtaagctatttatctttgtttttgaaatatcaaaccctggaggtcctttgtgcagtatgacttttgacttttttttaggttactttgtcagaagcataacagggtataagttgattcataataaacacctgtcaatcttccatcttaacctgttgttgtgctgtgatccttcagtttctaaaccagcaaggtttgagtcttcatagcacatcaggatgactttagaacggtcctcctaaactggtgccagactacctatgcccaactcaggttcatctggctgaatctcctaaaagatcaaggaaagaagcactgttctgtacctagggctatgaaaggggtttctctcctgttctggagtctggattgtgagcaggagagctttggtcatctttgtgctatggccacccttttctcttccttaaagggaacattacgtttctatgtccttctatttcatagaaactgatcctagtagtggttttcacagaacagcatggtgcgtgcttgtgacaccttacaataaaaggagaagccaacagaaattaaagtgcacaaacaagcagtagattggcataaggagggtgtggtgcacaacccatcccactatttccatggatgtgtttgttgatattttcacaaaccagttggtcctcagagtgaggtgcctgggaatctcccagaaagcctcagggctgcccactactggaatctcatcaccagataagcaggcttatggtttagccaagggagaatggtgttaccctctaacctcatttttttaacgtagtaggtaagtgtttggtggcatttatccatctgccagaatgtcccattgctcctggatcttccctggttacttgtagaagaaattaaatctataaagtaaggctttctgtaagatgagacttccttcctaagtctcccatgatgttactgttgataaatttatatgtttaatattttttcaaataaaaaaacaagagaaaagtttatcacct

SEQ ID NO: 4716 - DNA, 600 bp, Cricetulus griseus
ctcacttctacaatgcagaccctgtgctatcagaagccgttctgggtctgaaccctgacccaagggagcattctttgttccttgacatccatccggtcactgggatccccatgaactgttctgtgaagttgcagataagcctctacatcaaagctgtcaagggcattgggcaaacagggaagatcgagcccgtggtcctcccattgctgtggtttgagcagagcggtgccatgggcggcgagcccctgaacacgttctacacgcagctggtgctgatgccccaggtacttcagtatgtgcagtatgtgctgctggggctgggcggcctcctgctgctggtgcccgtcatctaccagttgcgcagccaggagaaatgctttttattttggagtggtagtaaaaagggctcgcaggataaggaggccattcaggcctactctgagtctctgatgtcaccagctgccaagggcacggtgctgcaagaagccaagctgtagggtcccaaagacaccacgagcccccccaacctgatagcttggtcagaccagccatccagcccctacaccccgcttcttgaggactctctcagcggacagtcgc

SEQ ID NO: 4717 - DNA, 1400 bp, Cricetulus griseus
cccagggcaacccctgttctccagcctagaccccagccccagccgcagccccagccttcagctcagcttcagcaacagacggtaatgatcaccccgacattcagcactgctccacagacaaggatcatccagcagcctttgatataccagaacgcagcaaccagcttccaagtcctgcaggctcaagtccaaagcctggtgacatcctcgcaggtacagccagtcacgatccagcagcaggtgcaaactgtacaggctcagcgggtgttgacacaaacagccaatggcacgctgcagacccttgccccagcaacagtgcagacagttgctgcaccccaggtgcagcaggtcccggtcctggttcagcctcagatcattaagacagattcccttgttttgaccacactgaaaacagatggcagccctgttatggctgcagtccagaacccagccctcactgccctcaccacccccctccagacgggcgcccttcaagtaccaactctggtgggcagcaatgggaccattctgaccacaatgcctgtgatgatgggacaagagaaagttcctattaagcaagtacctggcggtgtaaagcagctagagccccccaaagaaggagagaggaggacaacacacaacatcattgaaaagcgatatcgatcctctatcaatgacaaaatcatagagttgaaggacttggtcatgggaacagatgccaagatgcacaaatctggcgttctgaggaaggccattgattacatcaaatatttgcagcaggtcaatcacaagcttcgtcaggagaacatggtactgaagctggcaaatcagaaaaacaagctcctgaagggcattgatttaggcagtctggtggacagtgatgtggacttgaagattgaagactttaatcagaatgtccttctgatgtctcccccggcctctgactcggggtcccaagcaggcttctctccctattctattgactctgagccaggaagtcctctgctggatgatgcaaagatgatgaaggttctgcaagtaaaaagcccaaggtagagttatcagaagaagagctgaaggcccattttgccaagggcacactgggcaagctaactgtgcctacactaaaggaggtctgtaaggcctatgggcttaagagtggaccgaagaagcaggaactgctagatgctctcaccagacacttccagaagaactgactgaaggtcacaccccagctacttcccacactgcagccagaccacctacttatgttctcaccaagttagcaggtgtttcttagctacaaagagttgcctgacagaaatgcaaaggacttgcttcatggagactgtagccctcccactttgttgtgccttatatgaataaacagctctaatgtt

SEQ ID NO: 4718 - DNA, 600 bp, Cricetulus griseus
  misc_feature (35)..(89): n is a, c, g, or t
aggttcagagggccaggttgaagtgggtggggctnnnnnnnnnnnnnnnnnnnnnnnnnnnnnnnnnnnnnnnnnnnnnnnnnnnnnnntgcgtgctgacacatggggacaaaaccactccttataaatgttcttgttcaggttttgtgatacatgcctggcctgtagttccaggagaggcaagaggattgctttaagtctgacagcctggtttacaaagctagttcaaagtcagctaagaccacatagtgtgcacaccacagcagcttgatccctcacactggcctcttgggtcagtacttgacaatgttgtatcttcaggtcagaggccttccagctgctgctttactcttcagcatgcggtgtccccttgggactgtctccatacatggcacaatcaggcagtgtcttacaggcaaggaaactgaggctgaaaacagagagaaggggcagccatcacacctcaggggtacagtagggctaattgagatctccaacctctagacccagcagggacttagcctccccatctcctgtctctgcaggccttggcagaccttctgctcgtcagtggggtagcaacagccacaaccctagcct

SEQ ID NO: 4719 - DNA, 600 bp, Cricetinae
tattaatgaagcattcaaagagcttggccgaatgtgtcagcttcatttgaagagtgaaaaacctcagacaaaactcctcattcttcatcaggccgtggcagtcatccttagtctagaacagcaagtcagagagaggaacctcaaccccaaagcagcctgccttaagagaagagaagaagaaaaggtctctgctgcgtcagcagagccaccaaccacgctgcccggaaccatcctgggcttagcgaaactaccaacctatgggtcatctgtaaacatcagccagttccagtgtcagcagtaggctagatagaagatgacctctcctcataaagacttggacaactcagattatctgaagacacaaaccaacctgacaggaaggagaagaaaaacaaaacacttgaagcaagaaactcaaatataatcctatgatcaaagcaactggtcaacacttccatcagaagtgaggataggaagctcatgagagaacgccggcccatgaggtgtttacagcatatcattctgctgtaagcaatgtgtcgcttctgcataatcagagactgtctcatctctcactcaacgtggaagttgccggaattc

SEQ ID NO: 4720 - DNA, 600 bp, Mesocricetus auratus
gatggttctcctctcgccttgctgggaggccaccaagggggcatcacccacctttgctttcaccccgatggcaacctcttcttctcaggagcccggaaggatgccgaacttctgtgctgggatctccggcagcctggccacctcctgtggtctttgagtcgggaagtgaccaccaatcagcgcatctactttgatctggacccgagtgggcagttcctagtgagtggcaacaccaacggaatggtctctgtgtgggacatcagtggcgctttcggtgacagcagcaagctgggacctgtgatgacttttctgccccagaaggactgcaccaatggagtgagccttcaccctagcttgcctctactggctactgcttccggccagcgcatgtttccagagcccaccaacagtggagatgaaggcgagccagagggggatcttcccctgctctccctatgccacgcccatcctgaatggcagcttcagctctggtggtgtggagggggaccagaccccagtagccctaatgacccccaagatgagaagggacaaggaagggcagagggctgtggggatgggttaatataaagattttgtata

SEQ ID NO: 4721 - DNA, 600 bp, Mesocricetus auratus
gtctccctcatccactggaccgggctcttcagacacaccttccacgtcttctcctgacgccaactcaggctgattcgtgtcttctacaggaaggctcacattttcagacagttcttgctcctcgattcgaggactcaactcaccgggagtattaaactctacttccagcggagcggagagaggaagtgggtgcccttgttgcggctcctggaacacaaccgagccagccacagaatctgcggctacctgggatcggtcatctccaccgcaaggctgtggcaccggttcagagtctgtattttcatccacaggggaaccttggggcactggagctggggcctggtcagaagagaggctgtccgggactacgagtcgctcctccgacgtcttcattctgtagagcaacagcggccgggcaagcctcgttgcaccggctaccagctgctgaggctacactgcattaaagtccccaggaattcgggtgcagaactgcagagccccgccgcgcctgccttcttcttccgggaagagttagccgaaccccgcaaccgagggcaaacaccgggaaaccaattcagggagaaaagcacctggggtcgc

SEQ ID NO: 4722 - DNA, 600 bp, Cricetulus griseus
gtggatgaaatgtgtaactgaagttgtcttcacctctggcccctccaggtagcagagcgcctccagctagtgacagttcaccgaggcgagagtgaggatggtgccttcactgaatgtaacaacatgaccctcatcaacttgctactcaaaatctttgggcccatacatgagagaaacctcacactgctcctgctgcttttgcaggtaacactgagggtggggtaaattatgtaagtgttcttatctcaagttcaccttggttcttattccagtccatttctccttctagatcctgagcagcgctgtcaccttctccattcgataccagcttgtccgactcttctatgatgtctgagttccctgaagactgactgcccatagcctccgttggacctcacccaggaccaacctgtctggtccaagactgccttctggtccaggcctctccaactgttggttttttcagttttgttttcagcttctcccatcacctgtaatgattattggcctggaccttattggactttaaagtccattagttgcactttgcccctggctttcttcagcttgctactcttcccctttctgtcccatctgcag

SEQ ID NO: 4723 - DNA, 973 bp, Cricetulus migratorius; identical to SEQ ID NO: 1081

SEQ ID NO: 4724 - DNA, 1400 bp, Cricetulus migratorius
ctggcttctggattcgccttcagtgactatttcatgagctggttccgccaggctccagggaagggactggaatgggttgctggcatagacactaaaagttatgattatgcaacctattactctggttcggtgaaaggcagattcaccatctccagagatgattcccaaagcatggtctacctgcaaatgaacaacctgagaactgaggacacagccacttactactgtacaagagaaatcggatactggggccaaggaaccatggtcgccgtctcctcagccacaacaacagccccatctgtctatcccttggcccctgcctgtgacagcacaaccagcaccacggacacggtgaccctgggatgcctggtcaagggctatttccctgagccggtgaccgtaagctggaactctggagccctgaccagcggcgtgcacaccttcccatctgtcctgcattctgggctctactccctcagcagctcagtgactgtaccttccagcacctggcccaagcagcccatcacctgcaacgtagcccacccggccagcagcaccaaggtggacaagaaaatcgagcccagaactgatacggatacatgtcctaatccaccggatccatgtcccacgtgtccaactcctgacctcttgggtggaccatctgtcttcatcttccccccaaagcccaaggatgtgctcatgatctccctgacccccaagatcacatgtgtggtggtggacgtgagcgaggaggagccagacgtccagttcaactggtatgtgaacaacgtagaagacaagacagctcagacagagacccggcagcggcagtacaacagcacctaccgcgtggtcagcgtcctccccatcaagcaccaggactggatgagtggcaaggtgttcaaatgcaaggtcaacaacaatgccctccctagccccattgagaaaaccatctccaaacccagagggcaagtccgggtaccacagatatatacctttcctccgcctatagaacagacagtcaagaaagatgtcagtgtgacctgcctggtcacaggcttcctccctcaggacatccacgtggaatgggagagcaatgggcagccacagccagagcagaactacaagaacacccagcctgtcttggactccgatggctcttacttcctgtacagcaagctcaatgtgcccaagagcaggtgggaccagggagattccttcacctgctccgtgatacatgaggctctgcacaaccaccacatgacgaagaccatctcccggtctctgggtaattgagctcagcacccagaaagctcttaggtcctaagctaccctggcaccctcctccacccttcccttgtataaataaagcacccagcactgccctgaaaaaaaaaaaa

SEQ ID NO: 4725 - DNA, 495 bp, Cricetulus migratorius; identical to SEQ ID NO: 1083

SEQ ID NO: 4726 - DNA, 579 bp, Cricetulus griseus
  misc_feature (99)..(114): n is a, c, g, or t
ccccccaacttgatgtatgaaggcttttggtctccctgggagtgggttgaggtgttgaggcagccagggcttgcctgtacactgacttgagaccagttnnnnnnnnnnnnnnnnttacaaacagtgctgcttgtttgtggctttgctagattctgggtagcagcgggggagggggtcactattacctttgctccaagaggttctagggtggtctgggccttgcctagtagtttttagtgggaggacacaagcatcatgacctttaaccagttatcacaaataccctgtccattgagttctgaagtcttaattgtgtcttggttggaagggtgtccatcctgaattgggaataccccctgggccaagttgggttcctgcagcaaacaaccctgtaatctcaaccttcctctacctttgtgggaagcaggaatcctgttgggagggtagctttactgcctttgagttctgcaagacagtgggaagtaaaagcagtctcggttctcttgctttaccagatacatgatcacaaagtttaagggtgttaaggctccccaggcatgggtatctttccccggtacc

SEQ ID NO: 4727 - DNA, 600 bp, Cricetulus griseus
ctgccagtgtgcgaggaaggcttctcactgcaccagaaaagctgtgtccagcactgcccaccaggcttcacaccccaagtcctcgatacacactacagcactgagaatgatgtggagatcatccgcgccagcgtctgcactccctgtcatgcctcatgtgccacctgccagggcccagctcccacagactgcctcagctgccccagccatgcctccctggaccctgtggagcaaacctgctcccgacaaagccagagcagccgagagtctcggcctcagcagcagcctcctgcactgcatccagaggtggaggtggagccccggctgcaggctggactgctgccctctcatctgcctgaggtggtggccggcctcagctgcgttttcattgtgctggtctttggcactgtcttcctggtcttgcagctgcgctcaggctttagcttccggggagtgaaggtgtacaccatggaccgtggcctcgtttcctacaaggggctgccccctgaagcctggcaagaggagtgcccatctgactcagaagaggatgagggccggggcgagaggaccgcctttatcaaagaccagagcgccctttga

SEQ ID NO: 4728 - DNA, 600 bp, Cricetulus griseus
tgtgtggtgtgcgaggaaggcttctcactgcaccagaaaagctgtgtccagcactgcccaccaggcttcacaccccaagtcctcgatacacactacagcactgagaatgatgtggagatcatccgcgccagcgtctgcactccctgtcatgcctcatgtgccacctgccagggcccagctcccacagactgcctcagctgccccagccatgcctccctggaccctgtggagcaaacctgctcccgacaaagccagagcagccgagagtctcggcctcagcagcagcctcctgcactgcatccagaggtggaggtggagccccggctgcaggctggactgctgccctctcatctgcctgaggtggtggccggcctcagctgcgttttcattgtgctggtctttggcactgtcttcctggtcttgcagctgcgctcaggctttagcttccggggagtgaaggtgtacaccatggaccgtggcctcgtttcctacaaggggctgccccctgaagcctggcaagaggagtgcccatctgactcagaagaggatgagggccggggcgagaggaccgcctttatcaaagaccagagcgccctttga

SEQ ID NO: 4729 - DNA, 600 bp, Cricetulus griseus
  misc_feature (208)..(227): n is a, c, g, or t
gcctggcaggcgggagttcggggtcttggacaccaaagctgagctgctggacatatctgtgctccagcccagatgcgagcacctgccaaggcaggagaactccgggcagctgctggagacagctggagaagtcccagggccttcagcaatgctttgccagcctgagacaggccaggggttgaggtctgcctcactgctattgcctctnnnnnnnnnnnnnnnnnnnnccccattagtccctgggctcagggcactgggtgggaggggagctgtccggtgctaccacaccatgccatcagtgggctagaccacagcagcagccagggacgggtcctggaagctcttggccagagagtgcctctccccctgcctcccaaccaggtctttggtggggggatcccaaagccattctggaagggctccagaggaaggtccagcctaggctcccacaaaattagcagcccccctcctgcacctctaggttgtctaaagaagcacagtgtaacttagggcaggctcctgaacctgcctcttcctgctttccacctccctaaatccctttctctggcccagtctttggcccttggttttctttctaga

SEQ ID NO: 4730 - DNA, 600 bp, Mesocricetus auratus
  misc_feature (136)..(196): n is a, c, g, or t
  misc_feature (199)..(213): n is a, c, g, or t
gggaagtggatgccttagagggtagccaggcagcatgattctcctggcagtgcttttcctctgcttcttctcctcgtactctgcctctgttaaaggtaagtgtatgttgcgttttcttaaacgtggatctctctcnnnnnnnnnnnnnnnnnnnnnnnnnnnnnnnnnnnnnnnnnnnnnnnnnnnnnnnnnnnnnttnnnnnnnnnnnnnnnagagttcctaactatacaatttttgaaagtgtatatggttggaatatttgggggtaagtgactaagtggaaatgaaaaaaattaatttctgactctgttttacgagagtggaggtccctttttgcttcacgccatccctgagaccagtgtgtttctagcttcgacttgttattcctggaaaaagatttgagctattgttacctgctgctgacagacacacagaatgcaatgccttcatttgaattgtaaaatgggattttaaaaacccagtcccgaaaattccttccagttgcttagcaatgggacagcaaaaagaatcgaatccaactgggaaaaaaaggcatttgattgccaaagaattatgaatgaaatgttagagcatgtatg

SEQ ID NO: 4731 - DNA, 600 bp, Mesocricetus auratus
ctcattccccgcccccttccgtcgctctctttggctctgatcccggtttgtttacgtttaattttggcatttccagaaagcaaatcctcgaggtgtaaaatgcctacctgccctctctcggatgttcaggtggacaagcagacagggatttggttgcggtacaagtacctttcacttgtggcccaagcctggcctctctcctctcccttcaccccccccaggagagacttagacgcttacccccacccctgcactgtccaatgcaagtcactcaaaagagctgtcaaagggtttttacccagtgtcacaaaggtcacctgttcaccatggccataggtcacacagaacatgtcccttcagctttattgagcctggtccatctcacctagcacagggcaggcgcttgcccgcacagacgctgagggcgcaggacccagctgagctaaggttagaccactgtacatagatctgccccgtggaattactctcctttggcactcagtaatagaacatgacatgcagtggggcggagctcctggcaatgtacatagatgcatcattcctgtagctttagacgtgcaactttagagacaagaagca

SEQ ID NO: 4732 - DNA, 1400 bp, Cricetulus griseus
  misc_feature (408)..(470): n is a, c, g, or t
ataagagctaagcagggggaaggctctcattggtgtagcccgtcgtccactgcattccccaaagtgaatattcaagtgtctaggcagtggcacattttcacactacaaataccattgtggaattggagacaaacaacagatttagatgcctacatatcatgaccagaagcactttagtataaagggcacagtgtagatatttttaccaatttcattttttagtactcaactgttgaaatcaaatatttagtctttcaaattctttaatgctttttctccctctggtagatatgggaacttattgctctgcattttttaattattgaggtataatacagcaacctctggcccagtgagatggctcactgagtaatggtgcttgctacacaaacctgaccacctgagttnnnnnnnnnnnnnnnnnnnnnnnnnnnnnnnnnnnnnnnnnnnnnnnnnnnnnnnnnnnnnnnagtgccctgtagcacacatgcccatcaataataataataaacaattaaaaaaataagtcaccctttcgagatacctttgagaacaaagaactggcctgtatgctttggtgcttggagagacccactatagcatttgccagagtgtcattctgaactctaggtgattgcttccctagagttcccctgtttgtgctctcacactttacagaaagctgcactgtctttacaagaccttctggatcagggttcaccgtgctttgggtaaaacaacaatggagactccaaaggagggaaaacaagagggactgccagagctcagatctccacggccaccctgaagcaaatcttgtcaatacctatcagctctgaaatgtattgacttttgtggcagatagtatctccggtttggatggtgtcctagcttgattcactgagtgtgtaataaaaccctgggcagaagtaaggaagaagttcatttccacttacaggtcacagccggttgtcaagggaagtgaggcaggaacatggctccctggctccatttccatgtcttactcagcttgcttttcttatacaaccagggccgcctgccaaggggtggctctgctcacaacagtaacaacaaaaagcacttcagacaatgcccacagactaatctgttagagacagtccctcaattgagatccccaggcaattatatttgtcaaattggcaaaacccagcacaggcggttttctctagcattaagactttagaacatttgagcacatttgttgtaagtgactgatatcccaaatcatgtatggctgagggtgtttttgcatttgtagagatttagctctattttagagatgtaaaataatgtttccttatagtcttgtttagcctaaaacatttttattcaataaagcttttaatttacatttcaac

SEQ ID NO: 4733 - DNA, 600 bp, Cricetulus griseus
tgaaaagcgatatcgatcctctatcaatgacaaaatcatagagttgaaggacttggtcatgggaacagatgccaagatgcacaaatctggcgttctgaggaaggccattgattacatcaaatatttgcagcaggtcaatcacaagcttcgtcaggagaacatggtactgaagctggcaaatcagaaaaacaagctcctgaagggcattgatttaggcagtctggtggacagtgatgtggacttgaagattgaagactttaatcagaatgtccttctgatgtctcccccggcctctgactcggggtcccaagcaggcttctctccctattctattgactctgagccaggaagtcctctgctggatgatgcaaaggtatgagcttttgacatttctcaccctcagaatctcttgttttccctaaggcattagtggccaggtgactggatcactgcttaaaacaatgtggggtggagaggaccaggaattctgttatgttagctgcatttaaagtggtgaaaactggtggtgcatgcctgaaatcccagtgggagggaggatgaggcaggaagatcttgagatggtaccaagaccatctccaa

SEQ ID NO: 4734 - DNA, 1400 bp, Cricetinae
  misc_feature (739)..(758): n is a, c, g, or t
ccccatagacaatattatgtctttcgatagccattcacatcatgagcgagtcatgagtgcccagctcaatgccatctttcacgattagaggcacgtcagtttcaccattcccgggaaacgaacccactgtgctttcagtgactgtcgtgtttacagaaggcagcctttttgctacgatttctgcaaagtgcaaatactcaaagcttcaagtgatatatgtatttattgtcgttactgcctttggaagaaacaggggatcaaagctcctgtttaccttatgtattgttttctatagctcttctattttaaaaataataacagtaaagtaaaaaagaaaatgtgtaccacgaatttcgtgtagctgtactcagatcatattaattatctgatcgggataaaaaaatcacaagcaataattaggatctatgcaatttttaaactagtaatgggccaattaaaatatatataaatatatatttttcaaccagcattttactacttgttacctttcccatgctgaattattttgttgtgattttgtacagaatttttaatgactttttataacgtggatttcctattttaaaaccatgcagcttcatcaatttttatacatatcagaaaagtagaattatatctaatttatacaagataatttaactaatttaaaccagcagaaaagtgcttagaaagttattgcgttgccttagcacttctttcttctctaattgtaaacagnnnnnnnnnnnnnnnnnnnnttgcacaatttgagcaatccatttcactttgaagttgttccctctccttaaaatagaaaccagattcatagtattcaagaggatgaaaaagagatgcatttcttatcaaaacatatcaattcattacttgcacaagcttgtatatacatattataaacaaatgccaacatacacacacactcctttaaatcaaaagctgcttgactatcacacacaatttgcactctttcatttttagtcttttctttgaattccatgattttatggagtgtctgacactgttgatgtttccagaaaatataaatgcatgattttatacatagtcaaacaaatggtggcttgtcatctattcatgtaataaatctgagcctaaaattattcaggttgttaaagttgggattgatacctacgtagtcagttagtacagtagcttaagtaaaattcaaaccattgaatccataattagaacaatagctattgcatgtaaaaatgcagtccagaacaagtgctgcctaggatgtgatgctggtaccactggaaatgacctgtactgtaatcttgtttgtaaccctgtgtattatggtgtaacgcacaatttagaaaacgctcatgcagttgcaataaaaatagtattgaaaatca

SEQ ID NO: 4735 - DNA, 1400 bp, Cricetulus griseus
agaatgagcagccaactggaacctgcgctgcatgcatcactggtgacaacaggtctcttgttgctaaccttgctgctgccaactgttacaaaaaggaaaagcatcttgatttggagaataactgggtgctggtagagaaggccagagtatactacatagccggcttttttcttactgtctccccagagtcagtattgaaagttgctcgctatgctgctgagaacaacaggatcttcactttgaacttgtctgcaccgtttattagccagttcttcaaggaatccttgatggaagtcatgccttatgttgacatcctctttggaaatgagacggaagctgccacttttgctcgagagcaaggctttgagactaaagacattaaagagatagccaaaaaggcacaggctcttgcaaaggtgaactcgaagaggccgaggaccgtggtcttcacacaagggagagacgacactgtagtggctacagaaaatgaagtcatggcttttgctgtcttggatcaaaaccagaaagaaatcattgacaccaatggagctggagatgcatttgttggagggtttctctctcaactggtctataacaagcctctgactgaatgcatccgagccggccactatgcagcaagtgtcattattaggcgaactggctgtacctttcctgagaagccagacttccactgatggaagaaagaaaactcaagctgggaggtgcaggctgcagtgacctcgtcctaagtgttcctgccataagaaagaataattgtactgctatttttgccaaccatgattctcattaatttagagggctcagtattgctcctagaacctttagtctttgaaatctgggggaaaatgtttatttccataatttgttagtgcctcttaaatgtcaaaaaggaatatagcatttcagtagaaacttttatttcattttccattgtttgtaaattcatctgtatttagtaaattaattggtttttttacatttctgctttaaatacaggtgcaatttaatataatagactttttaaagaaattaatgctaacatcattcttgagctttttatataaatatatttaatttggaggtatgtatatgcacacatgtcatatatatacatatatatctgataactggtcagataaggtacagaaatgtttatcacaccaaaggtggccacataagctcttcattgtgcttcagacatatgatggacttggaacaaccgattcccccaacatttgcatcatgttattcaaatcataacctatgcttactgatggtactctgtaatttgatacaaataaattaccatataggaatcctttctgtcttggcttatgctcaataaaactaagaagaaattgtaaaaaaaaacctcgagg

SEQ ID NO: 4736 - DNA, 952 bp, Mesocricetus auratus; identical to SEQ ID NO: 1094
  misc_feature (51)..(67): n is a, c, g, or t

SEQ ID NO: 4737 - DNA, 1290 bp, Cricetulus griseus; identical to SEQ ID NO: 1095

SEQ ID NO: 4738 - DNA, 431 bp, Cricetinae gen. sp.; identical to SEQ ID NO: 1096

SEQ ID NO: 4739 - DNA, 600 bp, Cricetulus griseus; identical to SEQ ID NO: 1097

SEQ ID NO: 4740 - DNA, 487 bp, Mesocricetus auratus
  misc_feature (298)..(376): n is a, c, g, or t
tgactccatcgacactgctgtctgatcgaggatctaggaaacatcctacttcttctcaaatccctaaaagaacttctcagtctgccctaaattctctacaacatccatcatctgtcccaggatttctgaatccttcccaatctgaacagagcactccagcacctttgttatctcctccaggtactggaatacatggaccatctgcctcagtttctcagaaaatgttcccaggttctgcaacctcagggtatcctgaacctttgccatatgttggtgggcctctgaaactttccctgtnnnnnnnnnnnnnnnnnnnnnnnnnnnnnnnnnnnnnnnnnnnnnnnnnnnnnnnnnnnnnnnnnnnnnnnnnnnnnnnatcatctcaacctgcccaaaggaatcttggtcatttgtcatatgtgagagagcctgtgagaaattctccatctgtcccagttcatagagcgattcaccattgaacaaatcc

SEQ ID NO: 4741 - DNA, 766 bp, Mesocricetus auratus; identical to SEQ ID NO: 1099

SEQ ID NO: 4742 - DNA, 1400 bp, Cricetinae
aactctgctgcttaccactccaagggcaaggagctgctagcccagaagctgcccgtgtggcagcaagcctgtgctgaccccaacaagattccagaccgcgctgtccagctgatgcagcagatagccagcagcaacggctccatccttcctagtaccctgtcagcctccaagtccaacctggtcatctcagaccccattcctggagccaaacccttgccagtgccacctgagctggcaccatttgtggggcggatgtctgctcaggagaatgtacctgtcatgaatggcgtcgcaggcccggacagcgaggactacaacccctgggctgaccgcaaggctgcccagcccaaatccctgtctcctccgcagtctcaaagcaagctgagcgactcgtactccaacacacttcccgtgcgcaagagcgtgaccccgaagaacagctatgccaccactgagaacaagacactgccacgttcaagctccatggcagctggcctagaacgtaacggccgcatgcgggtcaaagccattttctcccacgcggctggtgacaacagcactctgctgagcttcaaggagggcgacctcatcaccctgctagtgcctgaggcccgtgacggctggcactatggcgagagtgagaaaaccaaaatgcggggctggtttcctttctcctacactcgggtcctggacagtgacggaagtgacaggttgcacatgagcctgcagcagggcaagagcagcagcacgggcaaccttctggacaaggacgacctggccgtcccccctcctgactacggcacgtcctcccgggccttccccacccagacggccgggactttcaagcagagaccctacagtgtggccgttcctgccttctctcagggtctggatgactacggggcacggtctgtgagcagtgctgatgtcgaagtggccagattttgagctgcccctgactagagttagaatcccttcgctgatgtccatctgaaaccaacagtgaccaatgacagatcagcccctctgctcagctgacagctcatctgtgtcgcctgtgttcccactcacgcaaccgagggtagctgcgatgtgttcctgtctggagaagacagcctggctccactccctaacattgtctcacaccagcccagcctgggctggatcccaggtatccctggggaggtggctgcctcaagaagtcaatgcctgctggccatgggtgtgccccaacagagggggcaggcatctccagtcccgactgtggaaccttgaacacagaagaggacattctgtcagcttgtagttggaagggagcctattcccatgctgattttttttttatttttaattttttttagctcatatgtgtcagatcaataaacatgtgcctacctgta

SEQ ID NO: 4743 - DNA, 600 bp, Mesocricetus auratus
  misc_feature (86)..(109): n is a, c, g, or t
  misc_feature (451)..(467): n is a, c, g, or t
  misc_feature (469)..(497): n is a, c, g, or t
aacataggacatacttggatgtggagcctataactggattcactttacaatttgcaaaacgacttcaggtgaacatcctggtcaannnnnnnnnnnnnnnnnnnnnnnnaaagaatctgaagagaaattatattgtacctatactttggcttaatgagactggaactattggcgatgagaaagcagaaatgttcagaaatcaagtgactggaaaagtaaagcttcttggtctggtagaaatggtcttgcttgggcttggagtcgtgatgtttgttgcttttatgatttcatactgtgcttgcagatccaagaatagaaaataagtagcaaacacgactacatttacgcactggctacatgaagatttttgataaaaccaatctaaaaatgaagacttaatatatgctttgtttttacaaaacacacctatatttagttgaagaaatggtgnnnnnnnnnnnnnnnnngnnnnnnnnnnnnnnnnnnnnnnnnnnnnncatatatctcttatatatataatatatatatatgcactaagccaaagcatatttcaaaatgattaatttgacactgtagcctatattttataaaatccagtac

SEQ ID NO: 4744 - DNA, 225 bp, Cricetus cricetus; identical to SEQ ID NO: 1102

SEQ ID NO: 4745 - DNA, 146 bp, Cricetus cricetus; identical to SEQ ID NO: 1103

SEQ ID NO: 4746 - DNA, 286 bp, Mesocricetus auratus; identical to SEQ ID NO: 1104

SEQ ID NO: 4747 - DNA, 1373 bp, Mesocricetus auratus
  misc_feature (72)..(102): n is a, c, g, or t
cagtgacttccatgtccatcagacgatcacacaccttctgtgcacacatctggtgtctgaggtgtttggtannnnnnnnnnnnnnnnnnnnnnnnnnnnnnnccccattttcaagctgctggtagcccatgtgaggtttaccatagccatcaacactaaggcccgggaacagcttatctgcgagtatggcctttttgacaaggccaacgccaccgggggtggtgggcatgtgcagatggtgcagagggctgtccaggacctgacttattcctccctgtgcttcccggaggccatcaaggcccggggcatggacagcaccgaggacatcccctactacttctatcgagatgatgggctgctggtgtgggaagccatccagtcgttcacaagtgaggtggtaagcatctactacgaagatgaccaggtagtgatggaggaccaggaactacaggacttcgtgaaggatgtttacgtgtacggcatgcgtggcagaaaagcctcaggcttccccaagtccatcaagagcagggagaagttgtctgagtacctgactgtggtgatcttcacagcctcggcccagcacgcagctgtaaacttcggccagtatgactggtgctcctggatccccaatgctcctccaactatgcgggctccacccgccacggccaagggtgtggtgaccatcgagcagatcgtggctactctaccagaccgaggccgctcatgttggcatctaggcgcagtgtgggcattgagccagttccaagaaaatgagctgtttctgggcatgtaccccgaggaacatttcattgagaagccagtgaaggaagccatgacccgattccgcaagaacctggaggccatcgtcaatgtgatcgctgagcgcaataagaacaaaaagctcccctactactacctgtcaccagacaggattcccaacagtgtagccatctaagcctgccttcctggcccagcatctctctgggaaggccagtggttttggcagccagactcctggcaggctctagatgcaggtgatgtgtcttctttccatgctagctagcagtgctacccctgggcctggctattctagtttggggggacatgctcctgcttcttccggtctttggtggaagtatgtacacagtacagggacctccacctggatcccggctctgcagctgtgacccccagcccagctcagcacttccacactaagtagcaacagtccatcagagtaagtgacatctgtcctggttgggtcagggttaccttattctatttatgctttgtccaactgctttcatgtagtaggtgcctaaaaaaaaactcttgaatgaagattttgttatgaaataaaattcatttaaaac

SEQ ID NO: 4748 - DNA, 1400 bp, Cricetulus griseus
gaacattatggtatgggcttctctctttctgggccatggagtcattctgtgcttttattctcaagaatggtatgcccgccagcactgtcctctgaaaaatcccacctttctggattatgtccggccacgttcctggacttgtcagtacgtgttttagaagcctgggctctgcctactttcttgccgatgaggaatggatgttcttcctgattctggccagccgtcttcagcagttactgaatatatctaagccacattgtttggaccactccagcctctccaaatggctcacctgaagctgggctcggctcactaagttattatttttggtttgtttcctttgggagagaaaggagaccaattgctgaggtaaatggcgattttgggggggttatctcagctcaagctttggtagttttatctgtttgtttccttaattctgtccaaggagagactaagcatatcttgaccatgaattagccaaaacacttaggaagaaatcatttcagtacctgtgtcttagaagtttttcgtgcacactgttaggtgagctagctaactgtggcaactggggagaaataaattttgttatttctagtagaaagagagaaaatacctatttcccaaagataatcttgttatgctttctgctcatatctcttgttgctattttgttttgctttgtttctgtgctgggaatggaatccagggccttgcccagtggcagcacactgagccacacaccagtcccatgttgtatttttctgaaagttctggactattcttttttctttcttgtaacttttctgtttgttgtgatttttttaaaaataattagctttctttcaccttgaactcaatactagtacaaattcaagggtcaaaagtatgaaggggaaaatacattcccttttgaaacttcaaaagtcatttaaaacatatttgctgagttagtcataggttttaattatgctagcaaaaattctgtagaagattttattgtcactggtttgggttttttagacgtagggtcttgctatgtagctcaggctggacttgaacttgttatgtagcctggctagccttgaacccctgactgacctcctgcccatgcctcccaagtgctaggatcacagaagataccaccgtgcctggccaagattttcctttcttttagcttttaagttaattagaagtattctttggtacagttgctttattgtctaacaagtagtgactttccttgttatagactagagtccataatggaagtactaatctctctattactactaagcggctactaaggatccagaagctggcttctgaagcatccgctccatcattatactttaacagtatatttttagatgaaataaaatactatgtgatcatttgta

SEQ ID NO: 4749 - DNA, 582 bp, Mesocricetus auratus
  misc_feature (401)..(415): n is a, c, g, or t
gattccagttcttaacaaacaaatatagttgagatactcgttgcctctcctggaaaaggtggctgttttgtagagtggttgttttcattggcttaggacagattcttatgcagacctccccccgggaagtgagaaaacagttaatattttagtatgcagggcccagtccagaaaacaagccgttctaggtgtttccatggagaagcgtcaatacagggaattctcttaagtggggaattaagaaaaagagccaacagtggaaatctcttacctcaggtgtgactgggaggttgtaagaggaggccggttccctggtcatcagtgagaaccgtggcagcgctgcctcctaggagctaggaccatagagggttgtggtaaatggagccatgccaaggacaaannnnnnnnnnnnnnngatagaaatcgagccggggctgagtcagataccaaggcctccccaggcctccccaggtttgtcctcatagcctcaccagcacctcagagttccaaggtacctgaaagcagctggtgagggccctggggatggagattccctgggttgcagagcagagcaagagctgt

SEQ ID NO: 4750 - DNA, 1399 bp, Cricetulus griseus; identical to SEQ ID NO: 1108
  misc_feature (126)..(143): n is a, c, g, or t

SEQ ID NO: 4751 - DNA, 600 bp, Cricetulus griseus
cctgcagaaacctcttcggcccggtcaatcacgaagagctcacccgggacttggagaagcactgccgagatatggaagaagcgagtcagcgcaagtggaatttcgactttcagaatcacaaccccctggaagggagataccagtggcaggaggtggacaagggcagcttgccggagttctactacagacccccgcgcccccccaagggcgcctgcaaggtgccggcgcaggagagccaggatgtcagcgggagccgccaggcggtgccttcaattggctcccaggcatactctgaggaccggcatttggtggagcaaatgcctgatccgacggacagtccagcggggttagcggagcagtgcccagggatgaggaagcgacctgctgcagacgattcttcttcgcaaaacaaaagggccaacagaacagaagaaaatgtttcagacggttccctgaacgctggctctgtggagcagacgcccaagaagcccggcctccgaagacaccagacgtaaacagctccaagcagctccgaattaagaatatttccttgtttattagatacatcactgctttatgaagcaaggaagatatacatgc

SEQ ID NO: 4752 - DNA, 1400 bp, Cricetulus griseus
cagtaccaggctctccacatccaaagatggctttgctttcagccacgagattgggtgtgaataaaaataattcttgtccttttatttaacacttgtgatgagaagtcagctgtcctttgctgatactcggtgatctagattctcctctgtgtccctaattcttggtagtcaagaaaaattccattttgcgacaattttgtcagatgctgatagaccagcttcatcacatgtgaggttgtctgaaatggaaagctctgtagaaagggtgtgtcttttctgtttcagttgtgagcactaggtcagctgtgcggctggaaacgtcaagaatgcagatcttgcactgaggagctggacattgctcattagttctcccattgggttagtatatgcttctacgtggtaaaatcacattaccactggacagacaaacagccagtgtctgtcattgccctcagtggtccctcatcctgtgaagattaatattaggaactgagggaggggactgtggctctcagtgagatctgctcacgagccacatgtgagaagacactgaagggtggctctccatgtcattccatatgacagtgctcttcatcctggatcaaaggctttattactgtagcctgattcgaaggaactctgccctgtgaggacctatcattcctcatctgttaggctctacacccccaagccatggtcccaccattgaaggtgcctgtgactcctttccacctatttattgctatggacagtgacagagattaagtgcttttctaggttagccatttcttagcatctgaatttgataatttgtcttactgagctaacagatattttaaagacatccagcgtttttgctcaccgagagagatggctgctagtccccgctggcacatcctctggcaccacaggcaatgagagggtgttagggtggagctcttcaccacctcatggtgtggggatggtgcgctgggcggacttgatacacttaatgctcatggatagactgacatcggtctgggactgactgagaggtttgtcttctggtgttgaagtgttagtacattctgggtatgaaaggcattcgatatatttttcttaattatggggtttatttttctaaatatgggttaatcagcttgttgactgggcatgcccttaaaaggaatttaaatttcccactgtggaccttaaagaatcagggaattttgtttgttaaattctctttgggagaacagaacttctcttccctgaccactttattatctttgatttttttcaaagggcctcgattggtggttgtgcctcagctagactttatgggactttggttgttatatagtgggcatatataaagcctgaagtatactaaataaagttatttatttaaatataaaaaa

SEQ ID NO: 4753 - DNA, 434 bp, Cricetulus griseus; identical to SEQ ID NO: 1111

SEQ ID NO: 4754 - DNA, 600 bp, Cricetulus griseus
gagcccccagtctggctgtgaccctaggccgggctcctcgctcttgtggccttggctgtgtcagagacagtcctttgtctcacagtctgttctgctgtcgaccccctccccctgcagtctccattgaggacatccaggaagtaaggatggggcaccgcacagaaggcctggagaagtttgcccgtgacatacccgaggatcgctgcttctccattgtcttcaaggaccagcgcaatacactagacctcattgccccgtcatcagctgatgctcagcactgggtgcagggcctgcgcaagatcatccatcactcgggctccatggaccagcggcagaagctgcaacagtatccttttgggggcagagggtcatggctgggtgtggaatgtgtgtcggtcattttgtgcagctcttaacaaaataccagaatgtattagttacttttctgattgctgggatacttgacaaaagcaaatcaagaagaagggtttattatcatggtttgagagaatgctgtccatcatggcggaagaggcagtaggagcaccggagacagccagtcacattgtgtctacagtcaggaagcagagtgctgggccc

SEQ ID NO: 4755 - DNA, 600 bp, Cricetulus griseus
  misc_feature (543)..(558): n is a, c, g, or t
acggcgtgggccaggacgtagccagccgtcagaccgcagtcattaccaataatggtacggtatgcgctggctgctttgggccaggctgctggtgctggcgaccttgctgttggtatagtgtttgtccttcctaggcttcaacccatggtgggacacagagtttgagtttgaagtggccgtgcccgaccttgccctcgtccgctttgtagtagaggactatgacgcctcctctaagaacgactttattggccagagcaccatcccctggaacagcctcaagcaaggtgagtattagaagcaggggggcagccaggagcagtgggaggagcctggcttctctcagcctgcccctcactacgccttgagtatcctctccgagtgaccagaactgtctgtccttcctgccagggtaccgccacgtccacctcttgtctaagaacggagaccagcatccatcagctaccctctttgtgaaaatctccctccaggactaagcctggggattgggtgagatccaccctgagtgggtcaagctgtgtccannnnnnnnnnnnnnnnagctttgtgtcgccgactgctgatgggagctttaggcctgga

SEQ ID NO: 4756 - DNA, 600 bp, Cricetulus griseus
tcctgcctaatggaggccttggaagataagcgagtgaggttgcagccggagtgcaaaaagcgtctcaatgacagaattgaaatgtggagttacgcagccaaggtggccccagcagatggcttctctgatcttgccatgcaagtgatgacatctccctcaaagaactacatattatctgtgatcagtgggagcatctgcatattgttcctgattggcctgatgtgtggacggatcactaagcgtgtgacacgagagctcaaggacaggtagagctgcctgatcaccaaaggaactacctgcccagggcccagtttgtacagccttcctgtatagtgcaccctctcacttcgtccttctacgagtggcaccaacacccacwgtagagcagcatcaggtgccctctgcatcttcccatccagacttggccacatccgccgtgtcctcctcccacgctgccactgcagcattggcagctggctgctttggtggtagcctttgttggcgaagggtttacctgcctgtagacaattctgtcctaccaagagaactgccagtacttccagaaccgactcacctgacctgcaactcagattttttttt

SEQ ID NO: 4757 - DNA, 356 bp, Cricetulus longicaudatus; identical to SEQ ID NO: 1115

SEQ ID NO: 4758 - DNA, 1027 bp, Mesocricetus auratus
cgaacggcgagcagcggcggcggcgcggagagtgcagcggaggtttttgctggtttcggaccccagcggccggatggtgaaatcctccctgcagcggatcctcaacagccactgcttcgccagagagaaggaaggggacaaacgcagcgccacgctccacgccagccgcaccatgccgctcctcagtcagcacagccgcggcggctgcagcagcgagagttctagggccgccctccattgctgtagtaacctgggtccggggcctcggtggtgctcctgatgtccctcacccacccctgaagatcccaggtgggcgagggaacagtcagcgggatcacagtctttcagctagcgtcctctactccgatgagcggctgaatgtgacagaggagccaactgctaacgacaagaccagggttctgagcatccagtccaggctcacggaggccaagcaggtcacctggagggcggtgtggaacggcggtggcctctacatcgagctcccagctgggccctcgcctgagggcagcaaggacagtttcgcagctctcctggagttcgcggaggagcagctccaggccgaccacgttttcatctgcttccccaagaaccgtgaggacagagccgccctactccgaaccttcagctttcttggctttgagattgtgagacccgggcatcccctcgtccccaagagacccgacgcttgcttcatggtctacacgctggagagagaggactaggtgccggccctgcccgtgtccctgtgcctctcccgggtttgtccacatgtcctgattgtgcagaataaacgctcactccattagcgggtgcttcttccgagctgaatgctgtgtttgtcacactcaagtgttggctttaattctaaataaaggtttctattttactgtttttattgctgtttaagatggtcaggtgacctgtgttagcgcagcctcctttgaagcctggcagagatagatagtgtcacctcccttggctcaaacccaataagtgatctcgctca

SEQ ID NO: 4759 - DNA, 314 bp, Cricetulus griseus; identical to SEQ ID NO: 1117

SEQ ID NO: 4760 - DNA, 121 bp, Cricetulus griseus; identical to SEQ ID NO: 1118

SEQ ID NO: 4761 - DNA, 600 bp, Cricetinae gen. sp.
atctgttataatggaatttaatttattactacccaacttcccaagcactttctagctagttaagggcacttttcctcagtgtgaactctgaacatttgatctgtgccatgatcaaccaatgatatacatcttacacaaccaaatttatttgcctgtcccaagccataggtgtatgcactaagaggattgttgggtgttttcataagctttacatgttctcttgcctaacaaaacttactacaactttccaaacccaaatcctcgcattttgttcccagtttccttcattcaatttaataaccattttgagtttctgcttgaatttgtaagactgttgacacctaggaattgtcctaggcctcagctgagatttgcacctgaagcaattattgacatgaactccccaatggaagaaatttagttttgtttcttaagggctttttgtattattatctcacatacattttgataacctgtcaggtagacattattttccttttcttaaaccattatatgtcagtattgctcaatagaattatcaagtatttgaaagccaaaggtatagatgccaaaaaagtaaaaaaaaaaaaaactcgtgcc

SEQ ID NO: 4762 - DNA, 600 bp, Mesocricetus auratus
ttcctacacgccgctggcccctccgcagcagcagatcgtggccatggagcagagcccctgcggaagcagcgaccccttccagcagggcctcacgccaccccaaatgccaggtgaccacatgaacccctatgggaacgactccatcttccacgatatcgatagtgatacctccctcaccagcctcagcgactgcttcctcggctcctctgacgtgggctccctgcaggcccgcgtggggaaccccatcgaccggctctactccatgcagagctcctactttgcctcctgagagccagctgggccgcatggacgcttgggcctgggcctagggtgggaccacaggcctctgcagccagccggccccccagcccaccacccactcagactctacagacagccatacggtgccctcccctcggccagccggacctggctcaagtgcccactgggcacagccagacaggcagatgggtgcagcctgggcaggggttgtgtcctgcccacagagaccgcgtgactcctggggacccagagctctgggacagccactcacctcccagctctttgaccccatcacctcctctcccctccccatctctg

SEQ ID NO: 4763 - DNA, 600 bp, Cricetulus griseus
gagcagcaaaaatacagacttcttcattggcaagccgaccctgagagagctgacgtctcagcacccttatgcagaagtcttcatcggccggccacacgtctggaccgtggatctgaacaatcgagaggaagtagaggatgccgtgaaagccatcttaaaccagaagattgagccgtatatgccgtatgagttcacatgtgaagggatgctgcagagaatcaacgcgttcatagagaagcaggacttctgccatggccaggtgatgtggcctcccctgagcgccttgcaggtgaagctggctgagcctgggcagtcctgcaagcaagtgtgccaggagaaccagctcatctgtgagccatccttcttccagcacctcaacaaggaaaaggacttgctgaagtacagagtgacctgccaaagctcagaactgtacaaggacatcctggtgccatccttctaccccaagagcaagcactgtgtgctccaaggggatctcctgctcttcagttgtgccggggcccaccccacacaccagaggatctgcccctgccgggacttcatcaagggccaagtggccctatgcaaagactgcctatagca

SEQ ID NO: 4764 - DNA, 600 bp, Cricetulus griseus
cgcctggaacaggaaagctcagcccaatcagcagagtcggcccgcagctccgctcaatccgcaactccgacccgcgcagcccgcggagctcccgccgccggtctgggcagcatgaggcgcgcggcgctctggctctggctctgcgcgctggcgctgcgcctgcagcctgtcctcccgattgagccgtatatgccgtatgagttcacatgtgaagggatgctgcagagaatcaacgcgttcatagagaagcaggacttctgccatggccaggtgatgtggcctcccctgagcgccttgcaggtgaagctggctgagcctgggcagtcctgcaagcaagtgtgccaggagaaccagctcatctgtgagccatccttcttccagcacctcaacaaggaaaaggacttgctgaagtacagagtgacctgccaaagctcagaactgtacaaggacatcctggtgccatccttctaccccaagagcaagcactgtgtgctccaaggggatctcctgctcttcagttgtgccggggcccaccccacacaccagaggatctgcccctgccgggacttcatcaagggccaagtggccctatgcaaagac

SEQ ID NO: 4765 - DNA, 1400 bp, Mesocricetus auratus
  misc_feature (467)..(484): n is a, c, g, or t
ccttgaaactcaaggaagctgccgtgagacagcgtgaagctctcaagaaactcaccaagaacatcgccactgactcgtatatcagtgttaacttgagagatgtctatgccaggagcatcatggagatgctccgattaaagggcagggagagagcaagtaccagaagcagtggtggagatgatttctggttttaaatttaccttctacttatttatagaacctatgcccatgtgactggactgctgaagccttgcttctgtggatgagtttcctgaacacttctcatcctcttcccggtgtattgattttctccgaatactaaacatctccttagcaactactgattattttgacacacctatcttcaacatagctaattaatacaaccaaaatcatttgggaaaagaaccacatgtctggattttcaaatattaattaatataatttcatacatcaaagtttaaagnnnnnnnnnnnnnnnnnntttcatacatcaaagtttaaagacccatgtgtcattgtttttaggttttcccacctttgcattttttttttactggaaattgaactgaacagcccagagtggggggggggaatgagtgaatgtttaaaaatatactgaacatcttttgggtatttagaaaatattctccaaatagattacctttttctctataaattaaagctgttgagtataacgataggctttgcaagcaaacactcaaccttggtggttatagagggtacctcatcttccatcaagtgctaatcactgggcccaaatggacagggctctgcctttcaccactccagttgcaagggacctcagactgctcagagtgcagtaggtgaggcttcaagtgcctagaaagcttcatcatcccagttaagtgcgatgtgtaaagaagaaagcagcatagtcatttgtgaaaagtagatggcttgtaaaatgtctcattacagatgaattatttaagttatgccttcaaaatcatgaaatcatgaatatggaaaagtgaagtcgttaagatcctaactttattcattgaaaagattggatagtctttttataagcgaaaatatgttgaaaggtatcgttagatgaacttgaagatctttttatttgttaaaaaatattgtggaaagctttctgattgtggaggtaaataacaaatgttcagactttgcaggtgctttgacagtgtttatggtaataatacgatgcctaaatgatgtggcatataattaaagccaaaagttttaaagctaagaaataaccctggttctaatataatagtaagtaatattttcaaaagtctaacaaaggattccctcattgcctactttcttgatgtatgcaataaagttcctaaagaaaataaaattggttctgggataga

SEQ ID NO: 4766 - DNA, 1380 bp, Mesocricetus auratus
  misc_feature (652)..(723): n is a, c, g, or t
atgaaaatgaagaagcggaagtagaagaaaacgagcaggtcaccaacggcaccagcacgaactccacagaggtgtacggtgggaacggcagtagcggaggatacaatggagaagaaggcgaggaacagagcgtcaccgaagcaggtgtagaaggaaccacagtgggcagggagcagatcagtgatggccccacgacagcagtccttatgaatgggtttcagtatacaaccccaccacctgaagcctatggcaccacctccccaccattcagaaaacccaccaccgttgagtactggggagaatatgaacaaacggggaacaatgagtacaatggtgagtatcaaatctatgacaatgagaatggggagcctcgtggggacaattaccgagcctatgaggatgaatacagctactacaaggggcgtggctatgaaggctatgatggccaagattactactaccaccagtgaagccccacaccgccggggagggggggaattacccattctgtcattgcatctggctaccatttattttcaaagttcaactcaggaaggtgcaatatatcaaatgtgcattttacaatgttgaatggtgctacagtcccagagcgatttctgcaaatgcttctatttgtaatggcttctttttnnnnnnnnnnnnnnnnnnnnnnnnnnnnnnnnnnnnnnnnnnnnnnnnnnnnnnnnnnnnnnnnnnnnnnnntggggctggatggaatgctttgaaatggtaactctacagtgtttgccctattgctaactgcccaaacatactctttgtacaagatagatcaaagagagatttagaaacgacactgtatacaataattgtgtattcctatatcatacccactatccaatactgtagtaggtttaattctcatcctcatgtatttatatggcctgtatgcacgggttttaccgtaaataaacatgcaattcttcaaatgtgttataactaagaaggaatggggaccatgggaaagcagagggctttaaggagggctgtacaagtcagctaaaaagcaggcttatttccatcagggtttaatactcagaggatctgaaaaccatctcagtgttctctcctcaataaatctgcatgactaaggtttgacaattgagggcagaatcagctatatacaccagggaataaaaacttcttagagttgccagatttaacaagcatagatccatggtgtgaaatgcccacttcagtttgaatttcagataaacaatgattggtttttaatgcaagtgttcccccccccatgaataattagtctctgtgaaatatctggaataaacttaacgctgaataaatgacatactttaatattcaactgtaaaaaaaaaaaaa

SEQ ID NO: 4767 - DNA, 1400 bp, Mesocricetus auratus
  misc_feature (363)..(432): n is a, c, g, or t
gccctggatggatcagtcaggttcggcgtcggagctctctgcttggttctcagctggaagcggcactctacagtgagcaggagctgtcctatatccagcagggagaggtggctatgcagaaggccttgagtatcctcagcaaccaggaaggctggaagaaagagaaccagcaggaaaacggggatgaggtgctgagtaaagtggtccctgatgtgggcaaggtatttcggctggaggtggtggtagaccagcccatggacagactctatgcagaacttgtggaccgcatggaggcaatgggagagtggaacccaaatgtcaaggagatcaaggtcctgcaaaagattgggaaagacacagtcnnnnnnnnnnnnnnnnnnnnnnnnnnnnnnnnnnnnnnnnnnnnnnnnnnnnnnnnnnnnnnnnnnnnnngtgccaagcgccgaggctccacctgtgtgctggcaggcatagccacacattttggggagatgcctgaacaaagcggtgttatcagagctgaacagggtcccacctgcatggtgcttcacccactggctgggagtccctcgaagactaaattcacttggctgctcagtattgacctcaaggggtggctgccgaaaagcatcatcaatcaggtcttatcacaaacccagatggagtttgccaaccacctgcgcaagcgcctggagtccagctctgcctctgaggcccggtgttaagactgtacccactacatcaacctgcatgccatcagcagcctcccgcaggaagcctgcaagtctgtttcaaatctccagttgatgactacgggaggggtagtacttatcagacactaggactgactggcgaaacatgaccatcaggaaattagcaatgaggctgagcagaagagagcctcagcctctcccacaagattagctgtgaagtgggctaagagatagacatgctaacacttttatgtaggcctgtgtatgctcacctaaaaaccctactcaaaacgcaagtagttagtgtgacaagggggggtgtttaggaactgttgtcttctgagctcaaagccactgcctgaagcagtgtgtgcacacagcaaggcttccccagggacttcagtgaccctctgttcctccataaaaggccaagaacatcaaaccactcacaaacagacccttccagagtacactccaagttctctctaaggagaaaggaaactaaatattacgttggcttccctacttattacatcacaataaagtaccacacatgaaatttcagcctatacttgtcaagtcctatggcacagaatctgtgctgggagccacagcttcatcagagctctggatcaagactgtgggttccaatttcctagttcattaaaggaacaaaacttcacattt

SEQ ID NO: 4768 - DNA, 600 bp, Mesocricetus auratus
cgtatcaggcctgtggcccccatgctcatcccccacagggcaaacagtgacatgagcattggtgagtttagcatccccaagttcacacccgtgatcatcaatttgtgggcactgcatcatagtgagaaggaatgggaccagccagatcggttcatgcctgagcgcttcctagacccaacgggaagccatcttatcacaccctcattaagctacctgccctttggagctggagcccgctcctgcatcggagaggttctggcccgccaggagctcttcctctttatggctcacctgctgcagaggtttgacctcgatgtcccagatgatgagcagccgccctgcctgaagggtaacgccaacgtggtctttttgatagaccccttcaaagtgaagatcacagtgcgccaggcatggaaggatgcccaggcagaggttaacacctggaggccataactaatgtcccctggtcctatattgtgcagctcacagcacaaaattagaggtgctactcctactgcctcctatagtcctcttccttcctgtcctgttttctggtttgcagcaatggagggtgatatgctaaattaaagattttccaat

SEQ ID NO: 4769 - DNA, 600 bp, Cricetulus griseus
gacaagatggagccatctgcctctgggatgtactcacaggtagccgggtcagccatacattcgctcaccgtggagatgtcacctccctcacctgtaccacttcctgtgtcattagcagtggtttggatgacctcatcaatatctgggaccgcagcacaggcatcaagctttactccattcagcaggatctgggctgtggtgcaagcttaggtgtcatctcagacaaccttctggtgactggcggccagggatgtgtgtccttttgggacctaaactacggggacctgttacagaccgtctacttgggcaagaacagtgaggcccagcctgcccggcagattctggtactggacaacgctgccattgtctgcaactttggcagtgagctcagcctagtgtatgtgccctctgtgctggagaaactggactgagggcaggttgaccatacaacccactcgcccccacccagagtggggcctgtgggcagcaattctttggacctagactggagacaagagctaggcatctcctttgcagctgtctctaaactgttgtctcctgactgtaatattaaacttttttaaaaaccaccaaaaaaaa

SEQ ID NO: 4770 - DNA, 813 bp, Cricetulus griseus
ggaagatggcggcggccgcggagctgaagctgctggagaagtctctgggactgaggccggggaataagtacagcgctcagggcgagcgacagattccagttctacaaacaaacaatggtccaagtctaacgggattggctaccattgccacccatctagtcaaacaagccagtaaagagcacctgctggggagcactgcagaagaaaaggccttggttcagcagtggttagagtacaggatcacccaagtggacggacactccagtaaagaagacacccacaccctgctgaaggatcttaattcttatcttgaagataaagtctaccttgcaggatataacatcaccttggcagatatcctactgtactacgggctccatcgctttatagttgacctgacagtgcaagaaaaggagaaatatcttaatgtgtctcgctggttttgccacattcagcattacccagacatcaggcaacatctgtctagtgttgtcttcatcaagaacagactgtatgctaactcccactagaagttcctgctgggcagcagcaagattagaagtgtaaaatgtattttggaccatggttctaatgtaaattaatgtgatgtcattgtttctttgttaatgttggtagaatttttaacatgtaaactcaagtctgaatgttttatttgtcccttagttgaaggtttgcagttttttaatgtaaaaattcaactgttattcaagcaaatcacgattagattataaattatctcatatttataggtgaaatttattttaataaaatttgcttatcagtggcagaaac

SEQ ID NO: 4771 - DNA, 600 bp, Mesocricetus auratus
tatccttcttggagtcttcatcttctgttgggccccctttatcctccatgtcctcttaatgaccttctgcccaaataacccttactgtgtttgctacatgtctctcttccagatcaatggcatgttgatcatgtgcaatgcagtcattgacccctttatatatgcctttcggagcccagagctcagggatgcattcaaaaagatgttttcctgccacaggtatcagtagactttttgatccctgatttaaataatgtaaagagaccaacacggcatgacagtctgacaagtgatgatgcatcttagcagcctttctttctttaatagatggagtcaatcaattaaactgactagtgtttagcatagctggctttctaatgaagtattactgcagctgcaaactttatattgtatctagagagatgaaatggtaggctaaatagacgtatcgagtacacatcaatacaaatgtgaggatttggggttaagcaagtatttgttcttctgtgggtacctggaaaactgtcctggaaggcctttccaggtcagaaaccatgacaaccaattctccaactaattaaatgtgttggttagattcct

SEQ ID NO: 4772 - DNA, 600 bp, Mesocricetus auratus
  misc_feature (239)..(338): n is a, c, g, or t
  misc_feature (406)..(420): n is a, c, g, or t
  misc_feature (446)..(483): n is a, c, g, or t
atggacagtatttgagctgaaaacacaggccttgatatccatctgggcttcctgtgtttagtgaggtctccagagcccggctaggccctcggggccccacaggaggtcccctttgccgcatggtggcagcactgagcggctcagcaggagctgggccagagctctgccctgctgaggaggtcggatggagctcccccctccctgtgttccaggtgctgaaatccttcagggtggagacnnnnnnnnnnnnnnnnnnnnnnnnnnnnnnnnnnnnnnnnnnnnnnnnnnnnnnnnnnnnnnnnnnnnnnnnnnnnnnnnnnnnnnnnnnnnnnnnnnnngcagctggggtcccagtcaggccagcagctccctcctgtcctgacacccaagggcgcacttctttgcnnnnnnnnnnnnnnnttgggcccacactgtcatccatcagnnnnnnnnnnnnnnnnnnnnnnnnnnnnnnnnnnnnnnaggagttgcaaggccagggaagggactgggatgatcttgcagctcacgagcagtccctgccgggtgatttcacccatcctttccaagagtcactccagccacctgtggccttccaaa

SEQ ID NO: 4773 - DNA, 600 bp, Mesocricetus auratus
ctgcaccacaaggtgtacgatctgaccaagtttttggaagagcaccctggtggggaagaggtactgagagagcaagcggggggcgatgccaccgagaactttgaggatgttgggcactctaccgacgcccgagaactgtccaaaaccttcatcatcggggagctccatccagatgacagatcaaagatagccaagccttcggaatctcttatcactactgtcgaatctaattccagttggtggactaactgggtgatcccagccgtctcagccctggctgtagccctgatgtaccgcctctacatgggcagaagactaacctgcttctccaaaccagggacgggggaaggactgccccagagaaggggagaaaagaagccagtgttaatcacttccgctgacagaaaccttcccctgaaaggtaagtaatatatctgtttccctttccttctgtgttcgttgaacaaataagaaactctttgtgctcttaaacttttcaaatgtgcctttttattcatcaactttattttgatgtttcttcactacgtaatttacttattgtaagctgatctttttaaaaatatatctggcttttaaaat

SEQ ID NO: 4774 - DNA, 600 bp, Mesocricetus auratus
gtaccgaggcctgaacctcaccgaggacacctaccagccccgactttacacctcctcaacctggagcaccttggtgacagagagttcctcgaggtcacgggcggcggtgcaagtgtatgggtatgcgcagtactatccatatggctatgattcaaggcggtggtactacccctaccagtccttccagaccccgcaacaccccagctttctcttcgtggacaagctgatctcctggtcagccacctacctccccactgtccagagctgctggaactacggcttctcttgcacccccgaggagctccccgtgctgggcctcaccaagtccagctactccgagcctgccatcggctatgaaaacaaagcgctgatgctctgcggagggtacagtgtggtggatgtcgccaacttcgcaggctctaaggctcctatccccagtgctctggataccaatagttccaagatttcgtctctctttccctgcagctcgggggccttcagcggcttccgcgtggtcatccgccccttctacctgactaactccactgacctggactaggtgggtccatctcactggtggggactcagacacccacgtgt

SEQ ID NO: 4775 - DNA, 573 bp, Mesocricetus auratus
agtgcgtcaccacagccctccagcatcgcgcctcggcgaccgcaagaacctcggtgaggacggcaggctgaaggtgacttccatgcgcgtgggcagctagatagggagggaatgatgaaacttaaccttgatgccacgcaagaaatcttgagggcacatgccagttgggtacggccgagagattctggcagacttgggggggaggggaaaaagaggcctggctcggaaaccttttgaggtggcgcctctgttggggacgtctctccctgcctccaagactctttccttggtcaaataaggagaactggactccacaggggcgaaaagggtacaaacttgagcattcgccgatgtccagcgggcaagccggtctgggtgcctttgtctgcccagaaacaacggctgggtcgaccattttaaggttaggaatcatgaaaatgaactgctagaggtttcaaagttgcggggacgcgtgtgcttcttcctgccggcccttcctcttcgcctgctccctcctttcctacttcccctcccctagattcttcccctctttagtaaaatatttcattacat

SEQ ID NO: 4776 - DNA, 492 bp, Mesocricetus auratus; identical to SEQ ID NO: 1134

SEQ ID NO: 4777 - DNA, 224 bp, Cricetulus griseus; identical to SEQ ID NO: 1135

SEQ ID NO: 4778 - DNA, 1400 bp, Mesocricetus auratus
aattgtctccaaagagaattaaagtggaggacggatttccagacttccaggaacctgtgcaaacactcttccagcaggccagagccaagagtgaggagctcgcagccctgagttcacagcagactgaaaaggggatggcaaagcagatggagctcctgtgtgcccaggccagctatgagaggctgcagcaggagaggaggctgacggcggggctctacaggcagagctccggggaacacagcccggatggcctgccctctgatggctcagatggacaaggagaaagacctttgaatctccgaatgcctaatgtacagaacagacagccccatcattttgtggccgatggggagctaagcagactttactccagtgaggcgaagtcccactcatcagagaacctcgggattttaaaagactaccctcactctgcttttaccttggaaaagaaagttattaaaacagagcctgaagactcaagatagcctagattctcccactgtctctgaaaatggcaccagattcaaggataatgctccatcatagaataagccttaataaccagtgttgcctcattctgctcaaacagaccatagccaaagcataagaactcacagtagtctgtggaaaccaggacaaagcaacagccacagaagaagaaatcgagagagtgctgcaatgtaacaaacactgaccattaccttcctgtgtaagttgtttgtatggaaaggctcaatattgtaggcattcactatttaagaatgtacaatgtgtctgtgtaatttatagaagcaaatctaggtgttaagacctttggtctaatagatgtggagaccattctttttacttgaaattttgttgtctactttaagtgtatttacggtaaatgttactcatcaacatttaggacttttgagtcgtaaaaagaaagcttagcaatgtagttattggcaaggtgacagtggctggagagaaatggaaggcaaatactcagtttacaccaaggaaaagactgtgtacttaatacttgattaaaattgattttggttaataggaaatgtgtagccgtcactaaataatgccgctttcattggtttaatccatgcacgaattaaaaatggaataatatttccgagatgaggtaggctacatttatgacagctgctcaagatgtgagacagaagacttgaagtaagcaggctaacgtgtaagagccttgacttaaacattggtatttcagaggatgtcaagtaaattaaggcagagtaaattaaccctgaatgtttaagataaagatgccgtgggagaatgacatggaggctgtgttttgtttttagtcctgctttgaatcatggctgtaataaatatcggtcctagtctgttctgtgagaaaaaaaaaa

SEQ ID NO: 4779 - DNA, 559 bp, Cricetulus griseus
  misc_feature (208)..(258): n is a, c, g, or t
gtgttacttagtcttgtgtgaagctgccttccctaagaagttggcctttgcctacctggaagacctgcactcggaatttgatgaacagcatgggaagaaggtgcctactgtgtctaggccctattccttcattgagtttgataccttcattcagaaaaccaagaaactctacattgatagtcgtgctcggagaaatctaggctccatnnnnnnnnnnnnnnnnnnnnnnnnnnnnnnnnnnnnnnnnnnnnnnnnnnnagtcttacagcggggggaagcactctcagcattggactcaaaggctaacaatttgtccagtctgtctaagaaataccgccaggatgcgaagtacctgaacatgcgttccacttacgccaaacttgcagcagtagctgtatttttcatcatgttgatagtgtatgtgcggttttggtggctgtgagatgtagtgagcctagtcactggtaagggagaatctagaacccggcaggtgtatgttttcaggaaactgagctcacagggctgtgtattagaacccaagtggaacttctgcctctaa

SEQ ID NO: 4780 - DNA, 359 bp, Mesocricetus auratus
agattctaaaggcatctctggtgaacatcccaagggataccgtcaacctctacaccacctctggatgcctctgccccccacttcatgttaatgaggaatacatcatcatgggttatgaagacgaggaacgctccaggctactcttggtcgagggcaccatcgttgagaagtggaaagatcgkmttggkrwgaargtcaagcgctgggatatgaaacttcgycatcttggactgggtaaaacggatgctagtgactccactcagaatcagaaggctggcaggaactctaatccccggccagcaggaagctaagtcctgaaatgcgaaagaccacacccattgactcccctactaagcagt

SEQ ID NO: 4781 - DNA, 215 bp, Mesocricetus auratus; identical to SEQ ID NO: 1139

SEQ ID NO: 4782 - DNA, 191 bp, Mesocricetus auratus; identical to SEQ ID NO: 1140

SEQ ID NO: 4783 - DNA, 338 bp, Mesocricetus auratus; identical to SEQ ID NO: 1141

SEQ ID NO: 4784 - DNA, 243 bp, Mesocricetus auratus; identical to SEQ ID NO: 1142

SEQ ID NO: 4785 - DNA, 225 bp, Mesocricetus auratus
caaaaatccatcaatgtaatccaccactgaggtctgcaatcaataaatgggacctcctgaaactgagaagcttcggtaaggcaaaggaaacagtcagtaagacaaaaacgaccacccacagaatgggaaaagatcttcaccagccccacatctgacagaggactgatttccaaaatatacaaggagctcaagaagctagccaccaaaacaccaaacaatgaaatt

SEQ ID NO: 4786 - DNA, 145 bp, Mesocricetus auratus; identical to SEQ ID NO: 1144

SEQ ID NO: 4787 - DNA, 381 bp, Mesocricetus auratus; identical to SEQ ID NO: 1145

SEQ ID NO: 4788 - DNA, 412 bp, Mesocricetus auratus; identical to SEQ ID NO: 1146

SEQ ID NO: 4789 - DNA, 224 bp, Mesocricetus auratus; identical to SEQ ID NO: 1147

SEQ ID NO: 4790 - DNA, 600 bp, Cricetulus griseus
  misc_feature (32)..(71): n is a, c, g, or t
tgtggtctgagaacacatgcagagcttgaagnnnnnnnnnnnnnnnnnnnnnnnnnnnnnnnnnnnnnnnngctaattgctgacgacaacacagttattattggctctgccaacatcaatgaccggagcatgctcgggaagcgagacagtgaaatggctgtcatagtgcaagacacagagacagtcccatcaataatggatggaaaagaataccaagctggctgctttgcccaaggacttcggctacagtgcttcaggcttgtccttggctatctttctgatccaagtgaggacctccaggatcctgtgagtgacaaattcttcaaggagatttgggtttcaacagcagctcgaaatgctaccatttatgataaggtgttccgttgccttccaaatgatgaagtgcacaatttaatgcagttgagagactttataagcaagcccatattagcaaaagatgatcccattcgtgctgaggaagaactgagaaagattcggggcttcttggtgcaattccccttttatttcttatctgaggaaaacctgctgccttctgtaggaaccaaagaagcaatagtgcccatggaggtttggacttaa

SEQ ID NO: 4791 - DNA, 1400 bp, Mesocricetus auratus
  misc_feature (258)..(272): n is a, c, g, or t
  misc_feature (655)..(697): n is a, c, g, or t
aaaagcggaggaactctaccagaagagagtgctgacaattactggcatctgtatcgccctgctggtggtcggcatcatgtgtgtggtggcctactgcaaaaccaagaaacagaggcaaaagcttcatgatcggcttcttcagagtcttagatcggaacggaacaacatggtgaacatagccaatgggcctcaccatccaaacccaccaccagagaccgtgcagctggtgaatcaatatgtatctaaaaacatcatctnnnnnnnnnnnnnnnttgagagagaagtggaaacctccttttccacaagtcactacacttccacagctcatcactccacgactgtcacccagactcctagtcacagttggagtaacgggcacacagaaagcatcgtttcagaaagtcactctgtaatcatgatgtcgtcagtagaaaacagtaggcacagcagccccgctgggggcccacgaggacgtcttcatggcctgggaggcctccagtgtaacagcttcctcaggcatgccagagaaacccctgactcgtaccgagactctcctcacagtgaaagacataaccttatagctgagctaaggagaaacaaggcttacagatccaaatgcatgcagatccagctgtcagcaactcatcttagatcnnnnnnnnnnnnnnnnnnnnnnnnnnnnnnnnnnnnnnnnnnngcctttaggaaggtatgtatcagccatgaccaccccaactcgtatgtcaccagtagatttccacacaccaagcacccctaaatcgcccccttcggaaatgtctccacctgtgtccagcatgacggtgtccatgccctccatggcagtcagcccatttgtggaagaagagaggcctctgcttcttgtgacgccaccaaggctccgggaaaagaagtatgatcacctccagcaactcaactcctttcatcacaaccctgcacatcagagtaccagcctcccccctagcccattgaggatagtggaggatgaggagtatgaaacgacccaggagtatgagccagttcaagagcctgttaagaaactcaccaacagccgacgggccaaaagaaccaagcccaatggccacattgccaataggttggaaatggacagcaacacaagttctttgagcagtaactcagaaagtgaaacagaagatgaaagagtgggtgaagatacaccattcctgggcatacagaaccccctggcagccactcttgaggcggctcctgccttcctgctggctgatgtcaggactggcccagcaggccgcttctcaacgcaggaagaattgcaagccaggctgtctagtgtaatcgctaaccaagaccctatcgctgtataaaacctaaataaacacatagattcacctgtaaaaaaaaaa

SEQ ID NO: 4792 - DNA, 396 bp, Cricetulus griseus
atttgtgatgcagaagttgacagatcatttaataggcaagacttttctgtgagactatttgaatattaagagcactgacctcaaacaaaactcatctctttcttatgggatcctgagttagtttatgatgtgaaagcaaattggtataaagcaagcctgatagctaaatcacactctggcttccaggcttgaatcctttcctcccccaccaggtctttcctgagtcaaaatgttgatacctgtgttatctccagaagcatatctttataagtctttagcaccgtaagctaaaccaattaaactataaagttagctggtctacctcgggttctgtgttttagcaacaaaaatgcatggatacacttggaatggtgcctctttaaatagtcactttaa

SEQ ID NO: 4793 - DNA, 561 bp, Cricetulus griseus
acttggcttcttcaccacttatttcttgcccctggccaccactcttaagagtaaagcaatggacctggcccaggcaggcagcacggtggagtccaagatttatgacacactccagtggcagatctggaccctcctgcctgggttctgcacaaggcccactgatgtggctgcctctttcaaaggcctggcacggacactgggcacagccattaatgagcgcccagacctgagggtcactgtgtgccaggccctacgcactctcatcaccaagggctgcgaagcagaggctgaccgtgctgaagtgagccgctttgctaagaacttcctgccaatcctcttcaacctgtatggacagcctgttgcagctggcgaggcggcagtccctcgccgtgctgtgttggaaaccatcaaaatttacctcaccataaccgagtctcagttggtgaacggcttcttggaaaaagccactgagaaagtgctcgatcctgccagctctgacttcaccaggttgtctgtcctggacctggttgtgggctttggctcctcacgcagatgaagccg

SEQ ID NO: 4794 - DNA, 579 bp, Cricetulus griseus; identical to SEQ ID NO: 1152

SEQ ID NO: 4795 - DNA, 135 bp, Cricetulus griseus; identical to SEQ ID NO: 1153

SEQ ID NO: 4796 - DNA, 299 bp, Cricetulus griseus; identical to SEQ ID NO: 1154
  misc_feature (85)..(101): n is a, c, g, or t

SEQ ID NO: 4797 - DNA, 580 bp, Cricetulus griseus; identical to SEQ ID NO: 1155

SEQ ID NO: 4798 - DNA, 131 bp, Cricetulus griseus; identical to SEQ ID NO: 1156

SEQ ID NO: 4799 - DNA, 446 bp, Cricetulus griseus; identical to SEQ ID NO: 1157

SEQ ID NO: 4800 - DNA, 289 bp, Cricetulus griseus; identical to SEQ ID NO: 1158

SEQ ID NO: 4801 - DNA, 463 bp, Cricetulus griseus; identical to SEQ ID NO: 1159

SEQ ID NO: 4802 - DNA, 532 bp, Cricetulus griseus; identical to SEQ ID NO: 1160
  misc_feature (302)..(342): n is a, c, g, or t

SEQ ID NO: 4803 - DNA, 543 bp, Cricetulus griseus; identical to SEQ ID NO: 1161

SEQ ID NO: 4804 - DNA, 441 bp, Cricetulus griseus; identical to SEQ ID NO: 1162

SEQ ID NO: 4805 - DNA, 579 bp, Cricetulus griseus; identical to SEQ ID NO: 1163

SEQ ID NO: 4806 - DNA, 459 bp, Cricetulus griseus; identical to SEQ ID NO: 1164

SEQ ID NO: 4807 - DNA, 575 bp, Cricetulus griseus
gcatgccaaattggcaccacttgcagctatttatcaagaaattcaggaggccgaacaagccattgaagaattagagtcaatgtgtaaaactctacataaacaagacgaaaagcagttgcaagaacttgtatcagaagaaaggcaaatcattgatcaaaagatcaacacactgtatagtgagcttttggagcagctagtgccaaaggagaaatatgacaaaagtgatgttattttagaggtgacatctggaagaactactggaggtgatatctgccaacagtttacccgagaaatatttgatatgtaccagaattattcatactataaacactggaaatttgagctgctgaattacacaccagcagattatggtggactacatcatgcagctgccagaatttctggagacagtgtctataagcatttgaagtatgaaggtggaatccatagagttcagcgaatcccagatgtgggcctgtcgtcaaggatgcagcgtattcacacaggaacaatgtcagttattgtccttcttcagccagatgaggttgatgtgaaagtcgacccccaggatctgc

SEQ ID NO: 4808 - DNA, 244 bp, Cricetulus griseus; identical to SEQ ID NO: 1166

SEQ ID NO: 4809 - DNA, 498 bp, Cricetulus griseus; identical to SEQ ID NO: 1167

SEQ ID NO: 4810 - DNA, 136 bp, Cricetulus griseus
gatgtggaatgtctggcagactcttgcatgaaacaggcaccctgaaagactgtccatcttctttagccatcattttcttgtgggtcctgaatgttcagtttatacaggatacagtcaagcataccatacaagagca

SEQ ID NO: 4811 - DNA, 567 bp, Cricetulus griseus; identical to SEQ ID NO: 1169
  misc_feature (57)..(91): n is a, c, g, or t

SEQ ID NO: 4812 - DNA, 580 bp, Cricetulus griseus; identical to SEQ ID NO: 1170

SEQ ID NO: 4813 - DNA, 580 bp, Cricetulus griseus; identical to SEQ ID NO: 1171
  misc_feature (474)..(474): n is a, c, g, or t

SEQ ID NO: 4814 - DNA, 564 bp, Cricetulus griseus; identical to SEQ ID NO: 1172

SEQ ID NO: 4815 - DNA, 385 bp, Cricetulus griseus; identical to SEQ ID NO: 1173
  misc_feature (280)..(295): n is a, c, g, or t

SEQ ID NO: 4816 - DNA, 365 bp, Cricetulus griseus; identical to SEQ ID NO: 1174

SEQ ID NO: 4817 - DNA, 365 bp, Cricetulus griseus
tttgcaaagtagcaaaagaatgattttatggttgttggttgggggagggtcaacacaacatgatgaactgcattaaaatgttacagcattaggaaggttgtgctatagaggaaataaatgttggaaaatattccaaaggtaatggtagaaatctgagaactaaaagtcacatggagggtaggtgcctaggttgggggtatgggcttcagaggtgcttgttgattgacatccttttgtgctggggatcctgttcctactgtttctccgaaggctttatgttctcttcttggctttctctgatgttcctctttcaataacattgctggtattggtgtgctaaacacacataattttttgctgacttc

SEQ ID NO: 4818 - DNA, 579 bp, Cricetulus griseus; identical to SEQ ID NO: 1176
  misc_feature (414)..(414): n is a, c, g, or t

SEQ ID NO: 4819 - DNA, 432 bp, Cricetulus griseus; identical to SEQ ID NO: 1177

SEQ ID NO: 4820 - DNA, 567 bp, Cricetulus griseus; identical to SEQ ID NO: 1178

SEQ ID NO: 4821 - DNA, 580 bp, Cricetulus griseus; identical to SEQ ID NO: 1179

SEQ ID NO: 4822 - DNA, 578 bp, Cricetulus griseus; identical to SEQ ID NO: 1180

SEQ ID NO: 4823 - DNA, 579 bp, Cricetulus griseus; identical to SEQ ID NO: 1181

SEQ ID NO: 4824 - DNA, 235 bp, Cricetulus griseus
tggcggcgtctgacgccgcgcgtctccctggcggcggtgtgtggtgacggcccgggtcagaatgacttcaacaagtaaggcgattgaattacaactacaagtgaagcagaatgcagaggaattgcaggacttcatgagggacttagagcactgggaaaatgacattaaacaaaaggacatggaactaagaagacaaagtggtgttcctgaagagaatttacctcctattcgaaat

SEQ ID NO: 4825 - DNA, 418 bp, Cricetulus griseus; identical to SEQ ID NO: 1183

SEQ ID NO: 4826 - DNA, 579 bp, Cricetulus griseus; identical to SEQ ID NO: 1184

SEQ ID NO: 4827 - DNA, 579 bp, Cricetulus griseus; identical to SEQ ID NO: 1185

SEQ ID NO: 4828 - DNA, 579 bp, Cricetulus griseus; identical to SEQ ID NO: 1186

SEQ ID NO: 4829 - DNA, 579 bp, Cricetulus griseus; identical to SEQ ID NO: 1187
  misc_feature (518)..(539): n is a, c, g, or t

SEQ ID NO: 4830 - DNA, 173 bp, Cricetulus griseus; identical to SEQ ID NO: 1188

SEQ ID NO: 4831 - DNA, 391 bp, Cricetulus griseus
  misc_feature (60)..(107): n is a, c, g, or t
  misc_feature (118)..(140): n is a, c, g, or t
  misc_feature (151)..(165): n is a, c, g, or t
  misc_feature (167)..(187): n is a, c, g, or t
  misc_feature (190)..(247): n is a, c, g, or t
  misc_feature (275)..(347): n is a, c, g, or t
cgaaagacggaacgccgccgcgctccgggactacagcctgttgctggacttcgagactgnnnnnnnnnnnnnnnnnnnnnnnnnnnnnnnnnnnnnnnnnnnnnnnnagttccctatnnnnnnnnnnnnnnnnnnnnnnntctgcgcgggnnnnnnnnnnnnnnntnnnnnnnnnnnnnnnnnnnnnacnnnnnnnnnnnnnnnnnnnnnnnnnnnnnnnnnnnnnnnnnnnnnnnnnnnnnnnnnnccgcgtggagatcatagccaacgatcannnnnnnnnnnnnnnnnnnnnnnnnnnnnnnnnnnnnnnnnnnnnnnnnnnnnnnnnnnnnnnnnnnnnnnnntaaccagctcacctccaatcccgagaacacggatttcgacgccc

SEQ ID NO: 4832 - DNA, 284 bp, Cricetulus griseus; identical to SEQ ID NO: 1190
  misc_feature (34)..(62): n is a, c, g, or t

SEQ ID NO: 4833 - DNA, 579 bp, Cricetulus griseus; identical to SEQ ID NO: 1191

SEQ ID NO: 4834 - DNA, 581 bp, Cricetulus griseus; identical to SEQ ID NO: 1192

SEQ ID NO: 4835 - DNA, 514 bp, Cricetulus griseus; identical to SEQ ID NO: 1193
  misc_feature (268)..(289): n is a, c, g, or t
  misc_feature (378)..(417): n is a, c, g, or t

SEQ ID NO: 4836 - DNA, 580 bp, Cricetulus griseus; identical to SEQ ID NO: 1194
  misc_feature (319)..(338): n is a, c, g, or t

SEQ ID NO: 4837 - DNA, 509 bp, Cricetulus griseus
gaagaaataaatatggcattgaggctgagacctaaaggataagttgggatgggtggaataacactccagaacaaagactgtatttttaaaggtagtgaggagaaaagttatgttcatgcaacaaacataaaaggccagtatattttattgtaaatgtagtgggaagctgttgaagggttctgtgcgacagagtatatgacctattttatttgaacatctttgctggccagagaatgtgttctaaggtgtgactggaaacaaaataaaccatcctgagtgaggtgaactgttgttccaacttagagattataaggatttgtgcataacagatcagatgtgagagaggctgactcccagggtttgacttcagtaattgaatagtggggttctgctccctgacttgggaaagattgaaagtagaatggatttggagtgatgaatagaattctagttgtatttgtttgtaagggtaccttattctacaagtcatggagtgtggcaaaaaggta

SEQ ID NO: 4838 - DNA, 481 bp, Cricetulus griseus; identical to SEQ ID NO: 1196
  misc_feature (97)..(97): n is a, c, g, or t

SEQ ID NO: 4839 - DNA, 579 bp, Cricetulus griseus; identical to SEQ ID NO: 1197
  misc_feature (63)..(81): n is a, c, g, or t

SEQ ID NO: 4840 - DNA, 579 bp, Cricetulus griseus; identical to SEQ ID NO: 1198

SEQ ID NO: 4841 - DNA, 578 bp, Cricetulus griseus; identical to SEQ ID NO: 1199

SEQ ID NO: 4842 - DNA, 352 bp, Cricetulus griseus; identical to SEQ ID NO: 1200
  misc_feature (241)..(279): n is a, c, g, or t

SEQ ID NO: 4843 - DNA, 360 bp, Cricetulus griseus; identical to SEQ ID NO: 1201

SEQ ID NO: 4844 - DNA, 580 bp, Cricetulus griseus; identical to SEQ ID NO: 1202

SEQ ID NO: 4845 - DNA, 580 bp, Cricetulus griseus; identical to SEQ ID NO: 1203

SEQ ID NO: 4846 - DNA, 466 bp, Cricetulus griseus; identical to SEQ ID NO: 1204
  misc_feature (241)..(294): n is a, c, g, or t

SEQ ID NO: 4847 - DNA, 580 bp, Cricetulus griseus; identical to SEQ ID NO: 1205
  misc_feature (539)..(555): n is a, c, g, or t

SEQ ID NO: 4848 - DNA, 366 bp, Cricetulus griseus; identical to SEQ ID NO: 1206

SEQ ID NO: 4849 - DNA, 551 bp, Cricetulus griseus; identical to SEQ ID NO: 1207

SEQ ID NO: 4850 - DNA, 580 bp, Cricetulus griseus; identical to SEQ ID NO: 1208

SEQ ID NO: 4851 - DNA, 579 bp, Cricetulus griseus; identical to SEQ ID NO: 1209

SEQ ID NO: 4852 - DNA, 568 bp, Cricetulus griseus; identical to SEQ ID NO: 1210

SEQ ID NO: 4853 - DNA, 505 bp, Cricetulus griseus; identical to SEQ ID NO: 1211

SEQ ID NO: 4854 - DNA, 579 bp, Cricetulus griseus; identical to SEQ ID NO: 1212

SEQ ID NO: 4855 - DNA, 578 bp, Cricetulus griseus; identical to SEQ ID NO: 1213

SEQ ID NO: 4856 - DNA, 416 bp, Cricetulus griseus; identical to SEQ ID NO: 1214
  misc_feature (155)..(178): n is a, c, g, or t
  misc_feature (306)..(318): n is a, c, g, or t
  misc_feature (320)..(341): n is a, c, g, or t

SEQ ID NO: 4857 - DNA, 578 bp, Cricetulus griseus; identical to SEQ ID NO: 1215

SEQ ID NO: 4858 - DNA, 524 bp, Cricetulus griseus; identical to SEQ ID NO: 1216

SEQ ID NO: 4859 - DNA, 580 bp, Cricetulus griseus; identical to SEQ ID NO: 1217

SEQ ID NO: 4860 - DNA, 578 bp, Cricetulus griseus; identical to SEQ ID NO: 1218
  misc_feature (448)..(467): n is a, c, g, or t

SEQ ID NO: 4861 - DNA, 547 bp, Cricetulus griseus; identical to SEQ ID NO: 1219

SEQ ID NO: 4862 - DNA, 567 bp, Cricetulus griseus; identical to SEQ ID NO: 1220
  misc_feature (357)..(392): n is a, c, g, or t

SEQ ID NO: 4863 - DNA, 580 bp, Cricetulus griseus; identical to SEQ ID NO: 1221
  misc_feature (272)..(290): n is a, c, g, or t

SEQ ID NO: 4864 - DNA, 271 bp, Cricetulus griseus; identical to SEQ ID NO: 1222

SEQ ID NO: 4865 - DNA, 579 bp, Cricetulus griseus; identical to SEQ ID NO: 1223

SEQ ID NO: 4866 - DNA, 187 bp, Cricetulus griseus; identical to SEQ ID NO: 1224

SEQ ID NO: 4867 - DNA, 577 bp, Cricetulus griseus
gcattcaagacccaggctaaggaacctggaacatacacgctgcgacagctacgggtcacactgggcccggtgtggtttgtccttgcacacatccaccccattgtacagtacgatgtgtactctcaggaacctcagctgcacgtggagccgctggctgatagccttttggctggcattcctcagaaagtcaagtttactgtcactactgggcattatacagtaaagaacggagacagcctccagctcagcaatgttgaagccatgctcatcttgtgtcaggcagagaacagggccgtggtctactctaactcaagagaagagtgttccactgcctcgctccggatccagtcctccgacaaggtcacgagtatcagtcttccctctgcacctgcataccatgtgatcgagtttgagctggaggttctgtctttaccttcagctccagcagttggtgaggatagcagtattctggggacaccagagccctacaggaagcagaaagacatgcagcaaactgactattgcatggtcaccacagatcacaaagtgtccattgattgcccgtggtctatctact

SEQ ID NO: 4868 - DNA, 457 bp, Cricetulus griseus; identical to SEQ ID NO: 1226
  misc_feature (71)..(86): n is a, c, g, or t

SEQ ID NO: 4869 - DNA, 580 bp, Cricetulus griseus; identical to SEQ ID NO: 1227

SEQ ID NO: 4870 - DNA, 580 bp, Cricetulus griseus; identical to SEQ ID NO: 1228

SEQ ID NO: 4871 - DNA, 579 bp, Cricetulus griseus; identical to SEQ ID NO: 1229

SEQ ID NO: 4872 - DNA, 579 bp, Cricetulus griseus; identical to SEQ ID NO: 1230

SEQ ID NO: 4873 - DNA, 568 bp, Cricetulus griseus; identical to SEQ ID NO: 1231
  misc_feature (373)..(373): n is a, c, g, or t

SEQ ID NO: 4874 - DNA, 579 bp, Cricetulus griseus; identical to SEQ ID NO: 1232
  misc_feature (160)..(182): n is a, c, g, or t
  misc_feature (249)..(269): n is a, c, g, or t

SEQ ID NO: 4875 - DNA, 579 bp, Cricetulus griseus; identical to SEQ ID NO: 1233
  misc_feature (320)..(335): n is a, c, g, or t
  misc_feature (425)..(458): n is a, c, g, or t

SEQ ID NO: 4876 - DNA, 581 bp, Cricetulus griseus; identical to SEQ ID NO: 1234
  misc_feature (535)..(535): n is a, c, g, or t

SEQ ID NO: 4877 - DNA, 567 bp, Cricetulus griseus; identical to SEQ ID NO: 1235

SEQ ID NO: 4878 - DNA, 567 bp, Cricetulus griseus; identical to SEQ ID NO: 1236

SEQ ID NO: 4879 - DNA, 578 bp, Cricetulus griseus; identical to SEQ ID NO: 1237

SEQ ID NO: 4880 - DNA, 580 bp, Cricetulus griseus; identical to SEQ ID NO: 1238

SEQ ID NO: 4881 - DNA, 579 bp, Cricetulus griseus; identical to SEQ ID NO: 1239

SEQ ID NO: 4882 - DNA, 177 bp, Cricetulus griseus
aactaactactcttccatctaagagatgcttagcacagattttcctaagaaaaatgggattttttttcctagtaagttatttgattagttactgtaaagaaatatagggaactgtgcttccttggattagacattgaaatggaaaatactgtgggaattttgatattcttgaaaaaa

SEQ ID NO: 4883 - DNA, 579 bp, Cricetulus griseus; identical to SEQ ID NO: 1241

SEQ ID NO: 4884 - DNA, 578 bp, Cricetulus griseus; identical to SEQ ID NO: 1242

SEQ ID NO: 4885 - DNA, 578 bp, Cricetulus griseus; identical to SEQ ID NO: 1243
  misc_feature (480)..(496): n is a, c, g, or t

SEQ ID NO: 4886 - DNA, 123 bp, Cricetulus griseus; identical to SEQ ID NO: 1244

SEQ ID NO: 4887 - DNA, 567 bp, Cricetulus griseus; identical to SEQ ID NO: 1245

SEQ ID NO: 4888 - DNA, 569 bp, Cricetulus griseus
agacctgccgcatgttttccctgcctaccatccgggggcactagttgctaggagaattgacacactgagacatgaatgctgctaacacatttctggctgatctgcgcaacgctgacatctatgtgtcggatgctgaggaggaggatgagacttctctggaaagtgacctggattcagaagagctggcaggagtcaggacacattccagtcagaaggacaggaagtgcttgcagtctgctcaagtggatgacactaaagaggaagaaggagagaatccattgctggtaccactagaagaaaaggcagtgctgcaggaagagcaagctaacctgtggttctccaaggacggcttcagtgggattgaggatgatgctgatgaggccctggagatcagtcaggcaaagctgctgctcaagagtcgtcagaaggagccatctacaccacctagtagtctgaagactgaacagaaacaccccccgtgccagaatgaggtccctaaggagacagaggctgtctcatggacagaagctgtcattgaccctatgggggaggacaaagtcaacagctca

SEQ ID NO: 4889 - DNA, 578 bp, Cricetulus griseus; identical to SEQ ID NO: 1247
  misc_feature (30)..(48): n is a, c, g, or t

SEQ ID NO: 4890 - DNA, 579 bp, Cricetulus griseus; identical to SEQ ID NO: 1248

SEQ ID NO: 4891 - DNA, 578 bp, Cricetulus griseus; identical to SEQ ID NO: 1249
  misc_feature (296)..(327): n is a, c, g, or t
  misc_feature (432)..(451): n is a, c, g, or t
  misc_feature (456)..(456): n is a, c, g, or t

SEQ ID NO: 4892 - DNA, 579 bp, Cricetulus griseus; identical to SEQ ID NO: 1250
  misc_feature (479)..(497): n is a, c, g, or t

SEQ ID NO: 4893 - DNA, 580 bp, Cricetulus griseus; identical to SEQ ID NO: 1251

SEQ ID NO: 4894 - DNA, 418 bp, Cricetulus griseus; identical to SEQ ID NO: 1252

SEQ ID NO: 4895 - DNA, 578 bp, Cricetulus griseus; identical to SEQ ID NO: 1253

SEQ ID NO: 4896 - DNA, 194 bp, Cricetulus griseus; identical to SEQ ID NO: 1254

SEQ ID NO: 4897 - DNA, 389 bp, Cricetulus griseus; identical to SEQ ID NO: 1255

SEQ ID NO: 4898 - DNA, 569 bp, Cricetulus griseus; identical to SEQ ID NO: 1256
  misc_feature (464)..(484): n is a, c, g, or t

SEQ ID NO: 4899 - DNA, 569 bp, Cricetulus griseus; identical to SEQ ID NO: 1257

SEQ ID NO: 4900 - DNA, 578 bp, Cricetulus griseus; identical to SEQ ID NO: 1258
  misc_feature (249)..(263): n is a, c, g, or t

SEQ ID NO: 4901 - DNA, 361 bp, Cricetulus griseus; identical to SEQ ID NO: 1259

SEQ ID NO: 4902 - DNA, 568 bp, Cricetulus griseus; identical to SEQ ID NO: 1260
  misc_feature (192)..(208): n is a, c, g, or t
  misc_feature (448)..(448): n is a, c, g, or t

SEQ ID NO: 4903 - DNA, 578 bp, Cricetulus griseus; identical to SEQ ID NO: 1261
  misc_feature (468)..(485): n is a, c, g, or t

SEQ ID NO: 4904 - DNA, 580 bp, Cricetulus griseus; identical to SEQ ID NO: 1262

SEQ ID NO: 4905 - DNA, 580 bp, Cricetulus griseus
gcaccccatagcatgtgtgcacccaaactcccatcacgtgtgtgtgcgcccacattttcggacatacttaattaattaccgaatagtacaaaacagaacaaaaagcgctttggcactatctgtaatgaatgtattttttaaaaacatgagtgtatctttaaaaaatataatacatgtaaaatattttactgattcaggtagaaatattttatagttatctaaaatagtaaagttactgtgcccatcttgttataaagtggtgttaactgaggatggcggcacctgactataaccctagcattcatgaggcagagggggagccatgggagttggaggccagccagggctgctagtgagactgcattgagcagaacagctatcccagttaattttaacagcttgttttgaatgtagtacagtattgtctgttgaagatagcatccaaagtaagtttaaaccaaggatttaagtatacccttatttaagacttaaaaatgtttgtttctaattattcttacccctttaggaaaggatatcccccttataaatgttgtagttctgattttattagatccccccc

SEQ ID NO: 4906 - DNA, 579 bp, Cricetulus griseus; identical to SEQ ID NO: 1264

SEQ ID NO: 4907 - DNA, 578 bp, Cricetulus griseus; identical to SEQ ID NO: 1265

SEQ ID NO: 4908 - DNA, 579 bp, Cricetulus griseus
ttttccctcagtcaggagcaggcctggcaggggtattcttcccagctcccttggcaggcttcccttttctgaggaaagtggcttgattcccctgactccttgccagctgctgatccctacatggccaggacagccacagtgcatgggacagctgtatttcctagggtagcagtgaccaagtctggagactcttttgtccaattaggcccagcttgggtctctgtcactcctacgaattccttctggggtgctgtcttaatttgccttttgtcacagggtgactcttggcaatggcagttagcagttacagattcttacactccagtgggcttcccttagatggtggagctaggttccttttcttgtcttggggccctgcctgtcaccccactgtctttctgggggccaaggctgtttttttctctcctggacacccttgtgttgtaattatgtacagaaggtcaggttggcctgggtggggtgctctgttctgtgtttcacagtgctcctgtactccagtttatttaaggggacatgcaaggaaatgccctccatttccttcccatatatgtcctgctc

SEQ ID NO: 4909 - DNA, 487 bp, Cricetulus griseus; identical to SEQ ID NO: 1267

SEQ ID NO: 4910 - DNA, 542 bp, Cricetulus griseus; identical to SEQ ID NO: 1268

SEQ ID NO: 4911 - DNA, 544 bp, Cricetulus griseus; identical to SEQ ID NO: 1269
  misc_feature (325)..(343): n is a, c, g, or t

SEQ ID NO: 4912 - DNA, 557 bp, Cricetulus griseus; identical to SEQ ID NO: 1270
  misc_feature (266)..(291): n is a, c, g, or t

SEQ ID NO: 4913 - DNA, 567 bp, Cricetulus griseus; identical to SEQ ID NO: 1271

SEQ ID NO: 4914 - DNA, 483 bp, Cricetulus griseus; identical to SEQ ID NO: 1272

SEQ ID NO: 4915 - DNA, 578 bp, Cricetulus griseus; identical to SEQ ID NO: 1273

SEQ ID NO: 4916 - DNA, 151 bp, Cricetulus griseus; identical to SEQ ID NO: 1274

SEQ ID NO: 4917 - DNA, 240 bp, Cricetulus griseus; identical to SEQ ID NO: 1275

SEQ ID NO: 4918 - DNA, 579 bp, Cricetulus griseus; identical to SEQ ID NO: 1276

SEQ ID NO: 4919 - DNA, 430 bp, Cricetulus griseus; identical to SEQ ID NO: 1277

SEQ ID NO: 4920 - DNA, 314 bp, Cricetulus griseus; identical to SEQ ID NO: 1278

SEQ ID NO: 4921 - DNA, 567 bp, Cricetulus griseus; identical to SEQ ID NO: 1279

SEQ ID NO: 4922 - DNA, 485 bp, Cricetulus griseus; identical to SEQ ID NO: 1280
  misc_feature (151)..(165): n is a, c, g, or t

SEQ ID NO: 4923 - DNA, 481 bp, Cricetulus griseus; identical to SEQ ID NO: 1281
  misc_feature (75)..(75): n is a, c, g, or t

SEQ ID NO: 4924 - DNA, 131 bp, Cricetulus griseus; identical to SEQ ID NO: 1282

SEQ ID NO: 4925 - DNA, 530 bp, Cricetulus griseus; identical to SEQ ID NO: 1283

SEQ ID NO: 4926 - DNA, 490 bp, Cricetulus griseus; identical to SEQ ID NO: 1284
  misc_feature (29)..(59): n is a, c, g, or t

SEQ ID NO: 4927 - DNA, 121 bp, Cricetulus griseus
  misc_feature (40)..(81): n is a, c, g, or t
tctggggcccgagaagacctctttcttccaagctttgggnnnnnnnnnnnnnnnnnnnnnnnnnnnnnnnnnnnnnnnnnntgatgtgcagctgataaaaactggagacatagtaggagcc

SEQ ID NO: 4928 - DNA, 580 bp, Cricetulus griseus; identical to SEQ ID NO: 1286
  misc_feature (343)..(361): n is a, c, g, or t

SEQ ID NO: 4929 - DNA, 580 bp, Cricetulus griseus; identical to SEQ ID NO: 1287

SEQ ID NO: 4930 - DNA, 515 bp, Cricetulus griseus; identical to SEQ ID NO: 1288

SEQ ID NO: 4931 - DNA, 544 bp, Cricetulus griseus; identical to SEQ ID NO: 1289

SEQ ID NO: 4932 - DNA, 499 bp, Cricetulus griseus; identical to SEQ ID NO: 1290

SEQ ID NO: 4933 - DNA, 579 bp, Cricetulus griseus; identical to SEQ ID NO: 1291
  misc_feature (48)..(48): n is a, c, g, or t

SEQ ID NO: 4934 - DNA, 437 bp, Cricetulus griseus; identical to SEQ ID NO: 1292

SEQ ID NO: 4935 - DNA, 518 bp, Cricetulus griseus; identical to SEQ ID NO: 1293

SEQ ID NO: 4936 - DNA, 503 bp, Cricetulus griseus
  misc_feature (240)..(254): n is a, c, g, or t
  misc_feature (312)..(343): n is a, c, g, or t
  misc_feature (355)..(373): n is a, c, g, or t
  misc_feature (389)..(406): n is a, c, g, or t
tggggttcaaggaacgacagtatcatgaagccagaaaaagtgctccattacgattctttataaggcaggcggtttggttgacaggtgcgaggagtatcacctttgacctttggtgtcaagggttcccctttgagcagcaatgaatgatgaccggagctagaacagggctcggggcaggccagcgcaccaggactgcagaggttttggacaaccagatcctgatcacctactggacttctnnnnnnnnnnnnnnnaaagcaactttctagccatccatttaggaggctttttgtgtttgtttttacttttcannnnnnnnnnnnnnnnnnnnnnnnnnnnnnnnggcactcgctcnnnnnnnnnnnnnnnnnnnaaactcacagagatcnnnnnnnnnnnnnnnnnntagtgctgggatcaaaggcgtgtgccaccaacgcccggctcatttaggaggctattaattgagctactgatttccatacttgttcttccaaaaggca

SEQ ID NO: 4937 - DNA, 582 bp, Cricetulus griseus; identical to SEQ ID NO: 1295
  misc_feature (528)..(528): n is a, c, g, or t

SEQ ID NO: 4938 - DNA, 475 bp, Cricetulus griseus; identical to SEQ ID NO: 1296

SEQ ID NO: 4939 - DNA, 176 bp, Cricetulus griseus; identical to SEQ ID NO: 1297

SEQ ID NO: 4940 - DNA, 474 bp, Cricetulus griseus; identical to SEQ ID NO: 1298

SEQ ID NO: 4941 - DNA, 579 bp, Cricetulus griseus; identical to SEQ ID NO: 1299

SEQ ID NO: 4942 - DNA, 479 bp, Cricetulus griseus; identical to SEQ ID NO: 1300
  misc_feature (327)..(344): n is a, c, g, or t

SEQ ID NO: 4943 - DNA, 534 bp, Cricetulus griseus; identical to SEQ ID NO: 1301

SEQ ID NO: 4944 - DNA, 508 bp, Cricetulus griseus; identical to SEQ ID NO: 1302

SEQ ID NO: 4945 - DNA, 499 bp, Cricetulus griseus; identical to SEQ ID NO: 1303

SEQ ID NO: 4946 - DNA, 527 bp, Cricetulus griseus; identical to SEQ ID NO: 1304

SEQ ID NO: 4947 - DNA, 580 bp, Cricetulus griseus; identical to SEQ ID NO: 1305

SEQ ID NO: 4948 - DNA, 436 bp, Cricetulus griseus; identical to SEQ ID NO: 1306

SEQ ID NO: 4949 - DNA, 560 bp, Cricetulus griseus
agtcagcttttaatagcatatcggcggagagagagaagctgaagcagctgatggagctggaggtctcctcttctccttctgctcaggtcgtcggtctgaagcatgccctgtcatctgaaaactccggggatgaaagccgagccctggtgcaccagctctccaacgagagcaggctgtctatcacggactccctttctgagttttttgatgcccaggaagttctgctatctcctagctcttcagaaaatgagatttctgatgacgattcatatgtcagtgacataagtgacaatctgtccttagacaacctcagtaatgatttagacaatgaaagacagaccttatggcctgttctggagagtggtggggaagccaggtccaaaaggcggacctgcttgcccgcacagggtcccaacaccagcagtgtcagcttgtggaccatcctgcggaacaacattgggaaggacctgtccaaggtggccatgcccgtggagctgaatgagcccctgaacacactgcagcggctctgtgaggagctggagtacagcgagcttctggac

SEQ ID NO: 4950 - DNA, 579 bp, Cricetulus griseus; identical to SEQ ID NO: 1308

SEQ ID NO: 4951 - DNA, 579 bp, Cricetulus griseus; identical to SEQ ID NO: 1309
  misc_feature (59)..(76): n is a, c, g, or t

SEQ ID NO: 4952 - DNA, 132 bp, Cricetulus griseus; identical to SEQ ID NO: 1310

SEQ ID NO: 4953 - DNA, 578 bp, Cricetulus griseus; identical to SEQ ID NO: 1311

SEQ ID NO: 4954 - DNA, 568 bp, Cricetulus griseus; identical to SEQ ID NO: 1312
  misc_feature (44)..(75): n is a, c, g, or t

SEQ ID NO: 4955 - DNA, 567 bp, Cricetulus griseus; identical to SEQ ID NO: 1313
  misc_feature (504)..(504): n is a, c, g, or t

SEQ ID NO: 4956 - DNA, 532 bp, Cricetulus griseus
catgacatgaacaaagttctggatctggaaatgaagggtgacatcgagaagtgcctcactgcccttgtgaaatgttccaccagcaccccagctttctttgctgagaaactttatgaagccatgaagggagctggaactcgccataaggcattgatcaggattatggtctcccgttctgaaatcgacatgaatgaaatcaaagcattttacctgaagaagtatggaatctctctttgccaagccatcctggatgaaaccaaaggagactatgaaaagatcttggtggctctgtgtgatggcaactagatgtccccgctgctcagaagcactgtgatgagagcatctcttagctgttgctttcctctatcacacaagcttaagtaagagggttgctttagcagataacaagctaattacccactttgaataatataacatatgaataagttttacatcatacctctgtacaatagagaaataattgttttattatgttttccccagattataaatccctataagcaagttactc

SEQ ID NO: 4957 - DNA, 580 bp, Cricetulus griseus; identical to SEQ ID NO: 1315
  misc_feature (433)..(451): n is a, c, g, or t
  misc_feature (504)..(532): n is a, c, g, or t

SEQ ID NO: 4958 - DNA, 580 bp, Cricetulus griseus
  misc_feature (49)..(77): n is a, c, g, or t
  misc_feature (130)..(148): n is a, c, g, or t
ggtgatgctgtttaatgtttactatgtgtcagacccaatatgagtagtnnnnnnnnnnnnnnnnnnnnnnnnnnnnnattctctgtattgttttggaggctgtcctggaactccctctgtagaccagggnnnnnnnnnnnnnnnnnnngtctgctgcctctgcctcccatgtgctggttttaaaggcatgcgccaccaatgcccggctcagtatgagtattttatacatattagaatattaaaataaaaatctacaattttgctattagttttacaatttgcaggttagaaaactgaaaaacataatagttaaggaatttttctggatgttgtggagttagtaagtagaaaagctagattttaaacttaggtaggacacctttaaccagcatatttttaggaatcatattgcctcctgaacaagatggtacctatgaaatgatggagaaaacaataggaactgaaggaaaatagtattgtggtgcccatttacagcctacacagtatttgctatccatcatctccttgagtccttaaagagcgggtattgctccctcccactctatatcctttctcatct

SEQ ID NO: 4959 - DNA, 579 bp, Cricetulus griseus; identical to SEQ ID NO: 1317

SEQ ID NO: 4960 - DNA, 494 bp, Cricetulus griseus; identical to SEQ ID NO: 1318
  misc_feature (65)..(82): n is a, c, g, or t

SEQ ID NO: 4961 - DNA, 579 bp, Cricetulus griseus; identical to SEQ ID NO: 1319

SEQ ID NO: 4962 - DNA, 379 bp, Cricetulus griseus; identical to SEQ ID NO: 1320

SEQ ID NO: 4963 - DNA, 579 bp, Cricetulus griseus; identical to SEQ ID NO: 1321

SEQ ID NO: 4964 - DNA, 448 bp, Cricetulus griseus; identical to SEQ ID NO: 1322

SEQ ID NO: 4965 - DNA, 299 bp, Cricetulus griseus; identical to SEQ ID NO: 1323

SEQ ID NO: 4966 - DNA, 504 bp, Cricetulus griseus
  misc_feature (298)..(331): n is a, c, g, or t
aaaagacaatagatgagccccccatatccgctgacttgctggaacattgcagtttctctcaagtggtgtttaacagtgtggagaagttctatattcctggaggagatgtcatgtgctattacaccttcacccaacagttcgtccctcgtcgcaaggactggattggcatctttaaagtggggtggaagacaacccgagagtattataccttcatgtgggttgctttgcccagtgacctaaacaaggaatcaaccaagcagcaagaagtccagttcaaagcctactatctgcccaaggnnnnnnnnnnnnnnnnnnnnnnnnnnnnnnnnnnaggtggtgtggtccggggagcaagtatccccttccagttccgtccagaaactgaggaggacatagtggttgttaccactaagggaaaggtggaagagatagagcaacacattaacgagcttctacgggaaaaccacgagctgaaagacagctgtgccagcctccagaatcata

SEQ ID NO: 4967 - DNA, 570 bp, Cricetulus griseus; identical to SEQ ID NO: 1325

SEQ ID NO: 4968 - DNA, 579 bp, Cricetulus griseus; identical to SEQ ID NO: 1326
  misc_feature (331)..(348): n is a, c, g, or t

SEQ ID NO: 4969 - DNA, 580 bp, Cricetulus griseus; identical to SEQ ID NO: 1327

SEQ ID NO: 4970 - DNA, 580 bp, Cricetulus griseus; identical to SEQ ID NO: 1328

SEQ ID NO: 4971 - DNA, 577 bp, Cricetulus griseus
  misc_feature (441)..(441): n is a, c, g, or t
tgcagtggctccagagcccgggcgggcgatctgcggctgccgcacggcactgtggccaccccggtgttcatgcctgtggggacacaggccaccatgaagggcatcacggcggagcagctgcacggcctgggttgccgcctctgcctgggcaacacctaccacctggggctgaggccgggcccggagctgatccagaaggcccgcggcctccacggcttcatggactggccgcacaacctcctcacggacagtggcggcttccagatggtgtccctgttctccctgtccgaggtgacggaagagggcgtccgcttccgctcgccctacgacggccaagagatgctgttgagcccggagaggtccgtgcagatccagaacgccctgggctctgacatcatcatgcagttggatgacgtggtgagcagcacagtgacaggcccncgagtggaggaggccatgcacaggtcagtccgctggctagacaggtgcattgcagcccatcagcgtgaggacaagcagaacctctttgccatcatccagggtggactgaatgccgatctgcggaccacttgcctga

SEQ ID NO: 4972 - DNA, 579 bp, Cricetulus griseus; identical to SEQ ID NO: 1330
  misc_feature (171)..(188): n is a, c, g, or t

SEQ ID NO: 4973 - DNA, 211 bp, Cricetulus griseus; identical to SEQ ID NO: 1331

SEQ ID NO: 4974 - DNA, 578 bp, Cricetulus griseus
agatcatagggctgagccgcaggattgctgatgaaaatgggaaacctcggcctgctttctccaatgatctggagcctgactttaaggcagtgagtattgctgtgacaggcgctggcagttgtcggcacttacaatttatccctgtggcaccaccgtctcctggaacctcagcagcaccagccacagaggttccagacagggaccttgagaagagcagtgaggatgatgtttatctgcacacagtcattccagctgttgtggttgcagccatcctgctcattgctggaatcattgctatgatctgctatcgcaagaagcggaagggcaagctgacccttgaggaccaggccacctttatcaagaagggggtgcctatcatctttgcagatgagctggatgactccaagcccccaccctcttctagcatgccactcatcttgcaggaagagaaggctcctctcccacctcctgagtaccccaaccagagtgtgcccgagaccacgcctctgaaccaggacactgtaggagagtacacgcctctgcgggatgaggatcctaatgcacctccctaccagcca

SEQ ID NO: 4975 - DNA, 578 bp, Cricetulus griseus; identical to SEQ ID NO: 1333

SEQ ID NO: 4976 - DNA, 578 bp, Cricetulus griseus; identical to SEQ ID NO: 1334

SEQ ID NO: 4977 - DNA, 579 bp, Cricetulus griseus; identical to SEQ ID NO: 1335
  misc_feature (537)..(537): n is a, c, g, or t

SEQ ID NO: 4978 - DNA, 338 bp, Cricetulus griseus; identical to SEQ ID NO: 1336

SEQ ID NO: 4979 - DNA, 579 bp, Cricetulus griseus; identical to SEQ ID NO: 1337

SEQ ID NO: 4980 - DNA, 498 bp, Cricetulus griseus; identical to SEQ ID NO: 1338

SEQ ID NO: 4981 - DNA, 578 bp, Cricetulus griseus; identical to SEQ ID NO: 1339

SEQ ID NO: 4982 - DNA, 509 bp, Cricetulus griseus; identical to SEQ ID NO: 1340
  misc_feature (300)..(319): n is a, c, g, or t

SEQ ID NO: 4983 - DNA, 579 bp, Cricetulus griseus; identical to SEQ ID NO: 1341

SEQ ID NO: 4984 - DNA, 579 bp, Cricetulus griseus; identical to SEQ ID NO: 1342
  misc_feature (510)..(552): n is a, c, g, or t

SEQ ID NO: 4985 - DNA, 550 bp, Cricetulus griseus
ccctacccccagggactcacttactctttgcccagactgggaagattgaacgcctccctctggagggaaacaccatgaagaagacagaagccaaggcctttttccatatccctgcaaaagtcatcattggactggcctttgactgtgtggacaaggtggtttactggacagacatcagtgagccttccattgggagagccagcctacatggtggagagccaaccaccatcattcgacaagatcttggaagccctgaaggcattgcccttgaccatctcggccgcaacatcttctggacagactctcagctagatcggatagaagttgcaagaatggatggcacacagcgaagagtgctgtttgacacgggtttggtgaaccccagaggcattgtgacagactccgtaggagggaacctttattggacagattggaacagagaaaatcccaaaattgaaacttcttacatggatggcaccaaccggaggattctcgcacaggacaacttgggcctgcctaatggcctgacctttgatgcattctcgtctca

SEQ ID NO: 4986 - DNA, 511 bp, Cricetulus griseus; identical to SEQ ID NO: 1344

SEQ ID NO: 4987 - DNA, 507 bp, Cricetulus griseus; identical to SEQ ID NO: 1345

SEQ ID NO: 4988 - DNA, 178 bp, Cricetulus griseus; identical to SEQ ID NO: 1346

SEQ ID NO: 4989 - DNA, 128 bp, Cricetulus griseus; identical to SEQ ID NO: 1347

SEQ ID NO: 4990 - DNA, 466 bp, Cricetulus griseus; identical to SEQ ID NO: 1348
  misc_feature (35)..(56): n is a, c, g, or t
  misc_feature (137)..(187): n is a, c, g, or t

SEQ ID NO: 4991 - DNA, 579 bp, Cricetulus griseus; identical to SEQ ID NO: 1349

SEQ ID NO: 4992 - DNA, 289 bp, Cricetulus griseus
aatcacccaggcataaggctgttgagttttctgcaggggccgagtctccctccaaaaggtggtgggcagacgcccaaaagtcccccagtacggtatgtccaggagactccacttgtattcagcagatgtgtatgtgtcagctccctctgccagttttgagagtcgttccattgccagatctgttcagagtgagccctgcagtggaatggtgagtggcattataagccccagcgatcttccagatagccctgggcagaccatgccaccaagcagaagcaaaacccctcca

SEQ ID NO: 4993 - DNA, 497 bp, Cricetulus griseus; identical to SEQ ID NO: 1351

SEQ ID NO: 4994 - DNA, 579 bp, Cricetulus griseus; identical to SEQ ID NO: 1352

SEQ ID NO: 4995 - DNA, 455 bp, Cricetulus griseus; identical to SEQ ID NO: 1353

SEQ ID NO: 4996 - DNA, 578 bp, Cricetulus griseus; identical to SEQ ID NO: 1354
  misc_feature (296)..(296): n is a, c, g, or t
  misc_feature (542)..(542): n is a, c, g, or t

SEQ ID NO: 4997 - DNA, 579 bp, Cricetulus griseus; identical to SEQ ID NO: 1355

SEQ ID NO: 4998 - DNA, 554 bp, Cricetulus griseus; identical to SEQ ID NO: 1356
  misc_feature (378)..(393): n is a, c, g, or t

SEQ ID NO: 4999 - DNA, 411 bp, Cricetulus griseus; identical to SEQ ID NO: 1357

SEQ ID NO: 5000 - DNA, 231 bp, Cricetulus griseus; identical to SEQ ID NO: 1358

SEQ ID NO: 5001 - DNA, 579 bp, Cricetulus griseus; identical to SEQ ID NO: 1359

SEQ ID NO: 5002 - DNA, 444 bp, Cricetulus griseus; identical to SEQ ID NO: 1360

SEQ ID NO: 5003 - DNA, 579 bp, Cricetulus griseus; identical to SEQ ID NO: 1361

SEQ ID NO: 5004 - DNA, 380 bp, Cricetulus griseus; identical to SEQ ID NO: 1362

SEQ ID NO: 5005 - DNA, 578 bp, Cricetulus griseus; identical to SEQ ID NO: 1363

SEQ ID NO: 5006 - DNA, 505 bp, Cricetulus griseus; identical to SEQ ID NO: 1364

SEQ ID NO: 5007 - DNA, 578 bp, Cricetulus griseus; identical to SEQ ID NO: 1365
  misc_feature (222)..(245): n is a, c, g, or t

SEQ ID NO: 5008 - DNA, 153 bp, Cricetulus griseus; identical to SEQ ID NO: 1366
  misc_feature (81)..(102): n is a, c, g, or t

SEQ ID NO: 5009 - DNA, 131 bp, Cricetulus griseus; identical to SEQ ID NO: 1367

SEQ ID NO: 5010 - DNA, 578 bp, Cricetulus griseus; identical to SEQ ID NO: 1368

SEQ ID NO: 5011 - DNA, 418 bp, Cricetulus griseus; identical to SEQ ID NO: 1369

SEQ ID NO: 5012 - DNA, 579 bp, Cricetulus griseus; identical to SEQ ID NO: 1370

SEQ ID NO: 5013 - DNA, 579 bp, Cricetulus griseus; identical to SEQ ID NO: 1371

SEQ ID NO: 5014 - DNA, 579 bp, Cricetulus griseus; identical to SEQ ID NO: 1372

SEQ ID NO: 5015 - DNA, 466 bp, Cricetulus griseus; identical to SEQ ID NO: 1373
  misc_feature (92)..(119): n is a, c, g, or t

SEQ ID NO: 5016 - DNA, 539 bp, Cricetulus griseus; identical to SEQ ID NO: 1374
  misc_feature (170)..(170): n is a, c, g, or t

SEQ ID NO: 5017 - DNA, 577 bp, Cricetulus griseus; identical to SEQ ID NO: 1375

SEQ ID NO: 5018 - DNA, 579 bp, Cricetulus griseus; identical to SEQ ID NO: 1376
  misc_feature (62)..(77): n is a, c, g, or t
  misc_feature (526)..(526): n is a, c, g, or t

SEQ ID NO: 5019 - DNA, 290 bp, Cricetulus griseus; identical to SEQ ID NO: 1377
  misc_feature (102)..(116): n is a, c, g, or t

SEQ ID NO: 5020 - DNA, 544 bp, Cricetulus griseus; identical to SEQ ID NO: 1378
  misc_feature (308)..(325): n is a, c, g, or t

SEQ ID NO: 5021 - DNA, 229 bp, Cricetulus griseus; identical to SEQ ID NO: 1379
  misc_feature (147)..(147): n is a, c, g, or t

SEQ ID NO: 5022 - DNA, 579 bp, Cricetulus griseus; identical to SEQ ID NO: 1380

SEQ ID NO: 5023 - DNA, 427 bp, Cricetulus griseus; identical to SEQ ID NO: 1381
  misc_feature (49)..(68): n is a, c, g, or t

SEQ ID NO: 5024 - DNA, 580 bp, Cricetulus griseus; identical to SEQ ID NO: 1382

SEQ ID NO: 5025 - DNA, 579 bp, Cricetulus griseus; identical to SEQ ID NO: 1383
  misc_feature (192)..(282): n is a, c, g, or t
  misc_feature (470)..(470): n is a, c, g, or t
  misc_feature (551)..(551): n is a, c, g, or t

SEQ ID NO: 5026 - DNA, 293 bp, Cricetulus griseus; identical to SEQ ID NO: 1384

SEQ ID NO: 5027 - DNA, 559 bp, Cricetulus griseus
acattgtatcttttctttttaatttcagttttactaaagtgttttatatatgttaaaattcatacacctaaatgtataatcgagtgaatttttgaagactatttactgttttgtatagcttttgccataaactacttttagaacattgtgattataacagtaagttccttcatactcattctgtttctaccacctgtagacagctatgaatccatgatctatagatttacctttcttgtacattttatgtaagtttcaaggctcattcatgtatatgtttctttgtaattgctggatagtgtctcatatactgttatgctgcatttttgttaattcattcagcatttgatggacatttagatcagttccaatttttggctattgtggattgtgttgctacaaacacatatatacaaatctttgcacattctaattttttattgggttagtgtttttagcttatcttttcaaacaaataaatattgcctacagggaaattcttaaagaagatgaaactggatcacttaaggctacgatagaggatattctttttaaggca

SEQ ID NO: 5028 - DNA, 546 bp, Cricetulus griseus; identical to SEQ ID NO: 1386
  misc_feature (353)..(383): n is a, c, g, or t

SEQ ID NO: 5029 - DNA, 383 bp, Cricetulus griseus
ggggcaagtccacacattgagaatttgctccatattcttagcttaatattaccattctttttaataacctcgtgcacagcttgtttcttcaacagaagacttgcagacttatagtccgctggctcaagtctagaatggaggctggccccccacaagtgcccaccgtatgtttctggaatgaatggatgcatcctccttgatgtgaagccataaagagacctttgctgtgaccttaacacagagatcatcatccactctggatatagactgtgcaggctccatgaatgggaaagggaccccacctcacataaaggacaatctgatttgctttgcctaaatgttgaactctgcgttgcgaatgcaagataaggatggggggaggt

SEQ ID NO: 5030 - DNA, 251 bp, Cricetulus griseus; identical to SEQ ID NO: 1388

SEQ ID NO: 5031 - DNA, 313 bp, Cricetulus griseus; identical to SEQ ID NO: 1389

SEQ ID NO: 5032 - DNA, 578 bp, Cricetulus griseus; identical to SEQ ID NO: 1390
  misc_feature (341)..(341): n is a, c, g, or t

SEQ ID NO: 5033 - DNA, 482 bp, Cricetulus griseus; identical to SEQ ID NO: 1391

SEQ ID NO: 5034 - DNA, 544 bp, Cricetulus griseus; identical to SEQ ID NO: 1392
  misc_feature (232)..(299): n is a, c, g, or t

SEQ ID NO: 5035 - DNA, 186 bp, Cricetulus griseus; identical to SEQ ID NO: 1393

SEQ ID NO: 5036 - DNA, 392 bp, Cricetulus griseus; identical to SEQ ID NO: 1394
  misc_feature (329)..(356): n is a, c, g, or t

SEQ ID NO: 5037 - DNA, 492 bp, Cricetulus griseus; identical to SEQ ID NO: 1395
  misc_feature (101)..(120): n is a, c, g, or t

SEQ ID NO: 5038 - DNA, 581 bp, Cricetulus griseus; identical to SEQ ID NO: 1396

SEQ ID NO: 5039 - DNA, 481 bp, Cricetulus griseus; identical to SEQ ID NO: 1397

SEQ ID NO: 5040 - DNA, 581 bp, Cricetulus griseus; identical to SEQ ID NO: 1398

SEQ ID NO: 5041 - DNA, 581 bp, Cricetulus griseus
acaccttgaccttgccattgtccccaccagtgacgatatactgcccatcaggagagtaggccagtgataccatgctgttgaagtggccctgttgcttgagtatataggattcactctgccattcccacaccagcagatggcccaggcgtgagcagccaaaggcgatccagtccccagagctgttgatggcaaccgaagcaaccctctgatcggagatactcagggagtggatgaggttgaactctgggagctcatgcagatggaagattccagaagcaaaacccgtgaccaaaagatgagtcttcttatgataggcagcggccgttaggttgttaaagtccccttctttattcaagaagtacttggccagccgtgagtacttcactttcccagccttctcctgttcagctggcatggtcttccctcggatagtggtccctcggtctccctcctcttcatcctccccctcctcctcctcttattcttccttctccctctgaagtaggtctgccttccagccttagggggtttcagcttcaggcctcagggggtgtatcacactgccacacacacagggctcc

SEQ ID NO: 5042 - DNA, 300 bp, Cricetulus griseus; identical to SEQ ID NO: 1400

SEQ ID NO: 5043 - DNA, 578 bp, Cricetulus griseus; identical to SEQ ID NO: 1401

SEQ ID NO: 5044 - DNA, 248 bp, Cricetulus griseus; identical to SEQ ID NO: 1402
  misc_feature (187)..(187): n is a, c, g, or t
  misc_feature (190)..(190): n is a, c, g, or t

SEQ ID NO: 5045 - DNA, 578 bp, Cricetulus griseus; identical to SEQ ID NO: 1403
  misc_feature (329)..(346): n is a, c, g, or t

SEQ ID NO: 5046 - DNA, 579 bp, Cricetulus griseus; identical to SEQ ID NO: 1404

SEQ ID NO: 5047 - DNA, 580 bp, Cricetulus griseus; identical to SEQ ID NO: 1405
  misc_feature (261)..(275): n is a, c, g, or t

SEQ ID NO: 5048 - DNA, 581 bp, Cricetulus griseus; identical to SEQ ID NO: 1406

SEQ ID NO: 5049 - DNA, 548 bp, Cricetulus griseus; identical to SEQ ID NO: 1407
  misc_feature (469)..(469): n is a, c, g, or t

SEQ ID NO: 5050 - DNA, 326 bp, Cricetulus griseus
ccctcccccttgtcccgggatcgctccgtcgcacccaccatgatggaagacgacggacagccccggactctatatgtaggtaacctttccagagatgtgacagaagtccttatactccaggtggggggggagatcggaccctgtaaaagctgtaaaatgataacagagcatacaagcaatgatccatattgctttgtggaattttatgaacacagagatgcagctgctgcattagctgctatgaatgggagaaaaattttgggaaaggaggtcaaagtaaactgggcaacaacaccaagtagccagaaaaaagatactttcaatca

SEQ ID NO: 5051 - DNA, 354 bp, Cricetulus griseus; identical to SEQ ID NO: 1409

SEQ ID NO: 5052 - DNA, 580 bp, Cricetulus griseus; identical to SEQ ID NO: 1410

SEQ ID NO: 5053 - DNA, 373 bp, Cricetulus griseus; identical to SEQ ID NO: 1411

SEQ ID NO: 5054 - DNA, 600 bp, Cricetulus griseus; identical to SEQ ID NO: 1412
  misc_feature (395)..(412): n is a, c, g, or t
  misc_feature (540)..(540): n is a, c, g, or t

SEQ ID NO: 5055 - DNA, 581 bp, Cricetulus griseus; identical to SEQ ID NO: 1413

SEQ ID NO: 5056 - DNA, 580 bp, Cricetulus griseus; identical to SEQ ID NO: 1414

SEQ ID NO: 5057 - DNA, 392 bp, Cricetulus griseus
ccaccccgctccccttttgggacatacacctacatttccagataaataacccaacactgacctcatacttgcccgggactcgttaatgttgcagtatttaacatatctgccaagaccaggatgaacaacaatcccactcctacccggattccccggatggatcagcgaggagcagggctttgagactcctgttgggacagtcggtcagcagctgaccaggacggtttgctcggcacagccggatgattcagtgctgctatcagaagatgtttttattttgtgtgaatgattggaacttttaagcctcccctcctgttccctaccccctccctttgcacctgtttttttcccaatgggttccagacaaagatgacttataaatatatttagtg

SEQ ID NO: 5058 - DNA, 189 bp, Cricetulus griseus; identical to SEQ ID NO: 1416

SEQ ID NO: 5059 - DNA, 580 bp, Cricetulus griseus; identical to SEQ ID NO: 1417

SEQ ID NO: 5060 - DNA, 459 bp, Cricetulus griseus; identical to SEQ ID NO: 1418

SEQ ID NO: 5061 - DNA, 194 bp, Cricetulus griseus; identical to SEQ ID NO: 1419

SEQ ID NO: 5062 - DNA, 555 bp, Cricetulus griseus; identical to SEQ ID NO: 1420

SEQ ID NO: 5063 - DNA, 568 bp, Cricetulus griseus; identical to SEQ ID NO: 1421

SEQ ID NO: 5064 - DNA, 580 bp, Cricetulus griseus; identical to SEQ ID NO: 1422

SEQ ID NO: 5065 - DNA, 581 bp, Cricetulus griseus; identical to SEQ ID NO: 1423

SEQ ID NO: 5066 - DNA, 235 bp, Cricetulus griseus; identical to SEQ ID NO: 1424

SEQ ID NO: 5067 - DNA, 578 bp, Cricetulus griseus; identical to SEQ ID NO: 1425

SEQ ID NO: 5068 - DNA, 580 bp, Cricetulus griseus; identical to SEQ ID NO: 1426

SEQ ID NO: 5069 - DNA, 432 bp, Cricetulus griseus; identical to SEQ ID NO: 1427

SEQ ID NO: 5070 - DNA, 580 bp, Cricetulus griseus; identical to SEQ ID NO: 1428

SEQ ID NO: 5071 - DNA, 418 bp, Cricetulus griseus; identical to SEQ ID NO: 1429

SEQ ID NO: 5072 - DNA, 506 bp, Cricetulus griseus; identical to SEQ ID NO: 1430

SEQ ID NO: 5073 - DNA, 580 bp, Cricetulus griseus; identical to SEQ ID NO: 1431

SEQ ID NO: 5074 - DNA, 554 bp, Cricetulus griseus; identical to SEQ ID NO: 1432
  misc_feature (217)..(236): n is a, c, g, or t

SEQ ID NO: 5075 - DNA, 578 bp, Cricetulus griseus; identical to SEQ ID NO: 1433

SEQ ID NO: 5076 - DNA, 60 bp, Cricetulus griseus
acaacaaaaaactttatatttctatactaattattctacaaactcttctaatcccaacat

SEQ ID NO: 5077 - DNA, 566 bp, Cricetulus griseus; identical to SEQ ID NO: 1435

SEQ ID NO: 5078 - DNA, 99 bp, Cricetulus griseus; identical to SEQ ID NO: 1436

SEQ ID NO: 5079 - DNA, 600 bp, Cricetulus griseus; identical to SEQ ID NO: 1437
  misc_feature (34)..(77): n is a, c, g, or t

SEQ ID NO: 5080 - DNA, 546 bp, Cricetulus griseus
ataatggaagcatgaggcaagggtaggcagtaagatccgggcaagaaaaggataagagcaaggaactgcacgctattaaggaacgttatctgggtggcaccaaaacacggcgccgaacaaggcatctcaatgcccgaaagtttgtctttgagtgggaagcatctgaagatacctccattgactacaaccctctgtacaaagagcggcaccaggtgcatttgttggggcgaggcttcattgcaggcattgacctaaagcagcagaaacgagaacagtcacgtttctatggagacctaatggaaaacaagcgcaccctggaagaaaaggagcaagaggaggcaagactccgtaaactccgtaagaaggaagccaagcaacgctgggatgaccgccattggtcccagaagacgttagatgagatgacagacagggactggaggatcttccgggaagactatagcatcaccaccaaaggtggcaagatccccaatcccatccgggcctggaaagattcatctctgcccccacatattttggaagtcattg

SEQ ID NO: 5081 - DNA, 580 bp, Cricetulus griseus; identical to SEQ ID NO: 1439
  misc_feature (151)..(169): n is a, c, g, or t

SEQ ID NO: 5082 - DNA, 567 bp, Cricetulus griseus; identical to SEQ ID NO: 1440

SEQ ID NO: 5083 - DNA, 483 bp, Cricetulus griseus; identical to SEQ ID NO: 1441

SEQ ID NO: 5084 - DNA, 578 bp, Cricetulus griseus; identical to SEQ ID NO: 1442

SEQ ID NO: 5085 - DNA, 580 bp, Cricetulus griseus; identical to SEQ ID NO: 1443
  misc_feature (117)..(138): n is a, c, g, or t
  misc_feature (170)..(195): n is a, c, g, or t
  misc_feature (198)..(252): n is a, c, g, or t
  misc_feature (279)..(300): n is a, c, g, or t
  misc_feature (317)..(350): n is a, c, g, or t
  misc_feature (361)..(379): n is a, c, g, or t
  misc_feature (400)..(427): n is a, c, g, or t
  misc_feature (439)..(458): n is a, c, g, or t

SEQ ID NO: 5086 - DNA, 600 bp, Cricetulus griseus; identical to SEQ ID NO: 1444
  misc_feature (27)..(80): n is a, c, g, or t
  misc_feature (464)..(485): n is a, c, g, or t

SEQ ID NO: 5087 - DNA, 579 bp, Cricetulus griseus; identical to SEQ ID NO: 1445

SEQ ID NO: 5088 - DNA, 579 bp, Cricetulus griseus; identical to SEQ ID NO: 1446
  misc_feature (195)..(223): n is a, c, g, or t

SEQ ID NO: 5089 - DNA, 567 bp, Cricetulus griseus; identical to SEQ ID NO: 1447

SEQ ID NO: 5090 - DNA, 578 bp, Cricetulus griseus; identical to SEQ ID NO: 1448

SEQ ID NO: 5091 - DNA, 458 bp, Cricetulus griseus; identical to SEQ ID NO: 1449

SEQ ID NO: 5092 - DNA, 579 bp, Cricetulus griseus; identical to SEQ ID NO: 1450

SEQ ID NO: 5093 - DNA, 569 bp, Cricetulus griseus; identical to SEQ ID NO: 1451
  misc_feature (385)..(403): n is a, c, g, or t

SEQ ID NO: 5094 - DNA, 577 bp, Cricetulus griseus; identical to SEQ ID NO: 1452

SEQ ID NO: 5095 - DNA, 406 bp, Cricetulus griseus; identical to SEQ ID NO: 1453
  misc_feature (98)..(98): n is a, c, g, or t
  misc_feature (112)..(112): n is a, c, g, or t
  misc_feature (148)..(148): n is a, c, g, or t
  misc_feature (295)..(319): n is a, c, g, or t
  misc_feature (321)..(340): n is a, c, g, or t

SEQ ID NO: 5096 - DNA, 267 bp, Cricetulus griseus; identical to SEQ ID NO: 1454
  misc_feature (76)..(92): n is a, c, g, or t

SEQ ID NO: 5097 - DNA, 324 bp, Cricetulus griseus
  misc_feature (31)..(58): n is a, c, g, or t
  misc_feature (86)..(140): n is a, c, g, or t
  misc_feature (142)..(154): n is a, c, g, or t
  misc_feature (270)..(291): n is a, c, g, or t
aggtctatgaacatttcaaccacaaactagnnnnnnnnnnnnnnnnnnnnnnnnnnnnccactgccaatcaaattaggcctttctnnnnnnnnnnnnnnnnnnnnnnnnnnnnnnnnnnnnnnnnnnnnnnnnnnnnnnncnnnnnnnnnnnnntgacaaaaagtagccccaatgactattttacttcaaaggcatgaagctatcgatactaatatcctacccccctctgccctcatctcagcactagcgggagcatgaggaggcctatnnnnnnnnnnnnnnnnnnnnnngctagcttactcatcgcatcggccccataggct

SEQ ID NO: 5098 - DNA, 466 bp, Cricetulus griseus; identical to SEQ ID NO: 1456

SEQ ID NO: 5099 - DNA, 590 bp, Cricetulus griseus
tcgacaccacgcgtccgcagtaattttttaggctatagaatttaaatattgtaactaactatacttataaattatttaagagtgttttaagaataattttgactgcaaaataatgtcaatagagagtattaatatttgtaaactttgaaatttagagtcagaaaattcttttaatattttagtcctttatgtaataagtaatacctaatatattgcatggtattttagccattcataaaagctgtattgtgtatgcctctttatctagagagtgagcaggggcaaaatggagggaaggaaattaattactggtctccatgagagattgggtgtaggacccatgcagatacaaaacttccttgatgtctcataaaataaagtagtacaatatttgcatatagcttacatatatccttccccttgtttacttcctacatttctttatttcttaagattcataatgctgtataaatacctgttaagccgttgttggataataatgacagaaaacatctatacatgtttggaataattttttcatgaatgttttcaatctataccttgaatctaaggatttagaatctacagta

SEQ ID NO: 5100 - DNA, 579 bp, Cricetulus griseus; identical to SEQ ID NO: 1458

SEQ ID NO: 5101 - DNA, 567 bp, Cricetulus griseus; identical to SEQ ID NO: 1459

SEQ ID NO: 5102 - DNA, 210 bp, Cricetulus griseus; identical to SEQ ID NO: 1460

SEQ ID NO: 5103 - DNA, 539 bp, Cricetulus griseus
  misc_feature (445)..(461): n is a, c, g, or t
aagggatggcctataaaaaatttggggttaatcattaaaagggaaaggggggtaagggggatttttattaaggaaagttctcggggggggaaaggtggaaaataaattatatggggggtaaactaacctcggggaggagtaattaggatttatagggaatatagggcggtaataaggatgttagtccctcctaaaaaaagggtaaaattggatcatgaaaatagggaaatggaaattattaattttccaattaaatcgcttgacgggggaagggctaggacatttagcctccctaaaaataaaaatagggctttaaggggaaaagctgtttgcaaaccccgggctataataataggccggtgggggatcccttcttgccttgttccaccaaaacaaattactcgaaaaaatgtaccaccttgcccgatctttacgggggaggctnnnnnnnnnnnnnnnnnggctggaaccatatacacccgcaaacactatcgccctgtgactgacggagcgattggcacaaaataaccccacgtccg

SEQ ID NO: 5104 - DNA, 76 bp, Cricetulus griseus
cttcctgcgagaaactgacatcccctaaattcgataggtatgtattcaaatcctatcgaaattcctggcgctgcac

SEQ ID NO: 5105 - DNA, 364 bp, Cricetulus griseus
  misc_feature (39)..(98): n is a, c, g, or t
  misc_feature (101)..(123): n is a, c, g, or t
  misc_feature (125)..(153): n is a, c, g, or t
  misc_feature (183)..(244): n is a, c, g, or t
gaggagtttattacggttcatacactatagtagaacctnnnnnnnnnnnnnnnnnnnnnnnnnnnnnnnnnnnnnnnnnnnnnnnnnnnnnnnnnnnnctnnnnnnnnnnnnnnnnnnnnnnncnnnnnnnnnnnnnnnnnnnnnnnnnnnnncatctatcccttatataggtaccactctannnnnnnnnnnnnnnnnnnnnnnnnnnnnnnnnnnnnnnnnnnnnnnnnnnnnnnnnnnnnntccatttcatcctaccattcattatcgctgccctagcaatggtccatcttctattcctacatgaaaccgggtctaataacccatcacgcctagattctgacccagataaaactccatttc

SEQ ID NO: 5106 - DNA, 391 bp, Cricetulus griseus
tacttcaaatccaaaccagtagagactccacctgaacaaaatggcagcattgccccgcagcccaacagcagattgaaggaagctataaatacaagtaaagatcaggaaagcaagtaccaagccagccacccaaatctcagaaggctgcatgatgaagacccaacccccaaagggcctgcttctgctgtgactgctgaggtttacccaaagaactcaagtcttcgagcctatcatcaaaagatcgacaacaacctagatgagctgtccatgggattgggccgactcaaggacatagccttaggaatgcagacggaaattgaggagcaggatgacattcttgaccggctaacaaccaaagtggacaagttagatgtcaatataaaaagcacag

SEQ ID NO: 5107 - DNA, 523 bp, Cricetulus griseus; identical to SEQ ID NO: 1465

SEQ ID NO: 5108 - DNA, 578 bp, Cricetulus griseus; identical to SEQ ID NO: 1466

SEQ ID NO: 5109 - DNA, 77 bp, Cricetulus griseus
ctctacaaactcttctaatcccaacatccctcagcaaacgagcctacactattttatattctacctgaagccccact

SEQ ID NO: 5110 - DNA, 567 bp, Cricetulus griseus; identical to SEQ ID NO: 1468
  misc_feature (384)..(384): n is a, c, g, or t
  misc_feature (440)..(440): n is a, c, g, or t

SEQ ID NO: 5111 - DNA, 579 bp, Cricetulus griseus; identical to SEQ ID NO: 1469

SEQ ID NO: 5112 - DNA, 567 bp, Cricetulus griseus; identical to SEQ ID NO: 1470

SEQ ID NO: 5113 - DNA, 567 bp, Cricetulus griseus; identical to SEQ ID NO: 1471
  misc_feature (342)..(359): n is a, c, g, or t

SEQ ID NO: 5114 - DNA, 577 bp, Cricetulus griseus; identical to SEQ ID NO: 1472

SEQ ID NO: 5115 - DNA, 550 bp, Cricetulus griseus
  misc_feature (31)..(67): n is a, c, g, or t
  misc_feature (86)..(104): n is a, c, g, or t
  misc_feature (130)..(207): n is a, c, g, or t
  misc_feature (212)..(288): n is a, c, g, or t
  misc_feature (294)..(400): n is a, c, g, or t
  misc_feature (402)..(448): n is a, c, g, or t
cgaaattgaggtaccgaggcccccccttcgnnnnnnnnnnnnnnnnnnnnnnnnnnnnnnnnnnnnncattgtacgagagggtacnnnnnnnnnnnnnnnnnnncccattgtacaaaaagggctccgatnnnnnnnnnnnnnnnnnnnnnnnnnnnnnnnnnnnnnnnnnnnnnnnnnnnnnnnnnnnnnnnnnnnnnnnnnnnnnnagtannnnnnnnnnnnnnnnnnnnnnnnnnnnnnnnnnnnnnnnnnnnnnnnnnnnnnnnnnnnnnnnnnnnnnnnnnnnnaacacnnnnnnnnnnnnnnnnnnnnnnnnnnnnnnnnnnnnnnnnnnnnnnnnnnnnnnnnnnnnnnnnnnnnnnnnnnnnnnnnnnnnnnnnnnnnnnnnnnnnnnnnnnnannnnnnnnnnnnnnnnnnnnnnnnnnnnnnnnnnnnnnnnnnnnnnntttttccatctcagacggaatctatggatctacattctttatagcaacaggttttcacggtctccatgtaatcattggaacatcattccttacagtatgctt

SEQ ID NO: 5116 - DNA, 578 bp, Cricetulus griseus; identical to SEQ ID NO: 1474
  misc_feature (400)..(414): n is a, c, g, or t
  misc_feature (462)..(479): n is a, c, g, or t

SEQ ID NO: 5117 - DNA, 96 bp, Cricetulus griseus; identical to SEQ ID NO: 1475

SEQ ID NO: 5118 - DNA, 522 bp, Cricetulus griseus; identical to SEQ ID NO: 1476
  misc_feature (273)..(296): n is a, c, g, or t

SEQ ID NO: 5119 - DNA, 300 bp, Cricetulus griseus; identical to SEQ ID NO: 1477

SEQ ID NO: 5120 - DNA, 579 bp, Cricetulus griseus; identical to SEQ ID NO: 1478
  misc_feature (483)..(483): n is a, c, g, or t

SEQ ID NO: 5121 - DNA, 376 bp, Cricetulus griseus; identical to SEQ ID NO: 1479

SEQ ID NO: 5122 - DNA, 349 bp, Cricetulus griseus; identical to SEQ ID NO: 1480

SEQ ID NO: 5123 - DNA, 421 bp, Cricetulus griseus; identical to SEQ ID NO: 1481
  misc_feature (343)..(371): n is a, c, g, or t

SEQ ID NO: 5124 - DNA, 498 bp, Cricetulus griseus; identical to SEQ ID NO: 1482

SEQ ID NO: 5125 - DNA, 367 bp, Cricetulus griseus; identical to SEQ ID NO: 1483

SEQ ID NO: 5126 - DNA, 227 bp, Cricetulus griseus; identical to SEQ ID NO: 1484

SEQ ID NO: 5127 - DNA, 227 bp, Cricetulus griseus
aatgggtaaggatgtggtgatccagcagagctgtgtgaaatgagtgttaagcagcccagagaggaagggaaatcaccacattgaagagcagggagaattatagactcccacccagggtgtagagacatacacagagatacacagagactcagagacagagatacacagagacggagatagtgagtgctagagagagggagagtaagataatgaaatgagagacaaag

SEQ ID NO: 5128 - DNA, 103 bp, Cricetulus griseus; identical to SEQ ID NO: 1486

SEQ ID NO: 5129 - DNA, 475 bp, Cricetulus griseus; identical to SEQ ID NO: 1487

SEQ ID NO: 5130 - DNA, 362 bp, Cricetulus griseus; identical to SEQ ID NO: 1488

SEQ ID NO: 5131 - DNA, 442 bp, Cricetulus griseus; identical to SEQ ID NO: 1489

SEQ ID NO: 5132 - DNA, 548 bp, Cricetulus griseus; identical to SEQ ID NO: 1490

SEQ ID NO: 5133 - DNA, 513 bp, Cricetulus griseus
atgaatggtttcttctcagctcccatataccactaaagggcattgaaccaggatccctgcgtgttcgagcacgatactctatggaaaaaatcatgccagaagaagagtacagtgaatttaaagagcttatactacaaaaggaacttcatgtagtctatgctttatcacatgtatgtggacaagaccgaacactactagccagcatcctactgaagatttttcttcatgaaaagcttgaatcgttgttgttatgcacactaaatgacagagagataagtatggaagatgaagccactaccctatttcgagctacaacacttgctagtaccttgatggagcagtatatgaaagccactgccacacaatttgttcaccatgctttgaaagactccattttaaagataatggaaagcaaacagtcatgtgagttaagtccatcaaagttagaaaagaatgaagatgtgaacactaatttagcacacctattgaacatactttcagagcttgtggaga

SEQ ID NO: 5134 - DNA, 560 bp, Cricetulus griseus; identical to SEQ ID NO: 1492
  misc_feature (131)..(155): n is a, c, g, or t

SEQ ID NO: 5135 - DNA, 442 bp, Cricetulus griseus
  misc_feature (29)..(29): n is a, c, g, or t
  misc_feature (45)..(45): n is a, c, g, or t
  misc_feature (96)..(97): n is a, c, g, or t
  misc_feature (143)..(143): n is a, c, g, or t
  misc_feature (147)..(147): n is a, c, g, or t
  misc_feature (158)..(158): n is a, c, g, or t
  misc_feature (169)..(169): n is a, c, g, or t
  misc_feature (177)..(177): n is a, c, g, or t
  misc_feature (205)..(205): n is a, c, g, or t
  misc_feature (225)..(225): n is a, c, g, or t
  misc_feature (312)..(312): n is a, c, g, or t
  misc_feature (331)..(331): n is a, c, g, or t
  misc_feature (351)..(351): n is a, c, g, or t
  misc_feature (361)..(361): n is a, c, g, or t
  misc_feature (369)..(369): n is a, c, g, or t
  misc_feature (389)..(389): n is a, c, g, or t
  misc_feature (399)..(399): n is a, c, g, or t
  misc_feature (406)..(406): n is a, c, g, or t
  misc_feature (413)..(413): n is a, c, g, or t
cacttgtctcctacgggaaacagcacggngacatgcttggttacnatttgtatagcagtcgccctggcagacattctcagtgagcctaccatgcanncacccatttgtgtggggttgtatgcacagtggggaagtgggaagtntttnttactcaaganactagaagatnaaatgaanacttttgcaagacagcagattgagcccnttttccagttctcatggctnattgtgttcctgaccctgctgctgtgtggggggctgggcctagtgtttgcttttacagtacgatacaaatttcgacatagcagtttnattgagttgcctggctctnttatatatattcttaattgncatttacttnggtggacngagggaaggacagagttggnactgggcctnggccctnagtaccngactggcgagacacattggctacctggag

SEQ ID NO: 5136 - DNA, 565 bp, Cricetulus griseus
  misc_feature (369)..(369): n is a, c, g, or t
atttatcgcttttaggaataggctgaataattctctccactttgcacaagtgcgcactgaacggatgctgttagaccttctacttgaagcaaacatatcaactagcttggcagaaagtatcaaatcaatgaatctgagaccagaggaagatgatgttccatgggaagatttgagagacaacagagacttggatgttttctttagctgggatccaaaggacaggaatgtttctgaagagcataagaaactctccttggaggaggagaccatgtggttaagaattcgcaccttaacgctgaggctcatcagtggacttccgagtcttacccaccctgtggagccaaagaactcagagaagacctccgagantggtgtgtcctcccggattgacattcttcgtttgctcctccaacagctagaagtggccgtggagacggggaagcgatttattgagaaggaaattcagtatcccttccttgggcctgtccccaccaggatgggcaggttcttcagctctggttgctgtcagtgccaggtccgctcctttcatcttgtcagtgatgtg

SEQ ID NO: 5137 - DNA, 333 bp, Cricetulus griseus
  misc_feature (100)..(100): n is a, c, g, or t
  misc_feature (195)..(195): n is a, c, g, or t
  misc_feature (225)..(225): n is a, c, g, or t
  misc_feature (287)..(287): n is a, c, g, or t
  misc_feature (292)..(292): n is a, c, g, or t
  misc_feature (300)..(300): n is a, c, g, or t
  misc_feature (302)..(302): n is a, c, g, or t
accccaaatcctgacgcatgttatcgaagggtttgtgatccaggagggggcggagcctttcccggtgggacgctcgtccctgctggtggggaatctcaanaagtaagtatgcacaggggttcttgcctgagaagcttccccagcaggatcataccaccaccactgactcagagatggaggagccctatctgcaanaatccaaagaggagggcacccccctcaaantcaagtgtgagctctgtggacgggtggattttgcctacaagttcaagcgttctaagcgcttntgttncatggttngngcaaaaaggtataatgtgggatgcaccaaac

SEQ ID NO: 5138 - DNA, 315 bp, Cricetulus griseus
  misc_feature (59)..(59): n is a, c, g, or t
  misc_feature (206)..(206): n is a, c, g, or t
  misc_feature (289)..(289): n is a, c, g, or t
atcaggacaagtaccgctaccggtaccccaaaggcgagtcctatgaagacttggtgcancgactagagcctgtcattatggaactggagagacaggagaatgtgctggtcatttgccaccaggctgtgatgcgctgcctgctggcctacttccttgacaaggcagctgaagagctgccctacctcaaatgtcccttgcacacagtnctgaagctcacacctgtagcttacggttgtaaagtggagtccatattcctgaatgtggcagctgtgaacacacaccgagacangcctcagaatgtaaacatatccaggc

SEQ ID NO: 5139 - DNA, 565 bp, Cricetulus griseus
  misc_feature (66)..(66): n is a, c, g, or t
  misc_feature (165)..(165): n is a, c, g, or t
  misc_feature (286)..(286): n is a, c, g, or t
gcgcggtggtcgttagaggaggacagcgcaccgcatcctacctgctcgcaggccctcggcgtctancacccgccggcggcacatctcgtcatgtcaggcactgcttggctttagttcctcactcctccgcccacccgcctacccgaagccgcgcccaccgcccanagccagagggatggtggtagtcaccgggcgggagccagacagccgtcactgggacggtgccatgtccagctccgaagccgaagacgacttcctggagcccgccactcctacggccacgcangcggggcacgggctgcccctgctgccccaggagcatttcaggaagggaaccttgtgggtcccaagctaacctggacagtcctcgcttcccaccaagcctttgttgacttgcagattaatcaatcactatagattgagcaggagaggaatggagcacggtagacagtgagattcactctcagcagtagagctcctgcatagcatgtgaagtccctgaatgagaagaaaggaatgagcaccatgatgccccgatgcatttgaaagcagctattggtctctg

SEQ ID NO: 5140 - DNA, 579 bp, Cricetulus griseus; identical to SEQ ID NO: 1498
  misc_feature (506)..(506): n is a, c, g, or t

SEQ ID NO: 5141 - DNA, 565 bp, Cricetulus griseus; identical to SEQ ID NO: 1499

SEQ ID NO: 5142 - DNA, 580 bp, Cricetulus griseus; identical to SEQ ID NO: 1500
  misc_feature (432)..(432): n is a, c, g, or t
  misc_feature (544)..(544): n is a, c, g, or t

SEQ ID NO: 5143 - DNA, 512 bp, Cricetulus griseus; identical to SEQ ID NO: 1501
  misc_feature (107)..(107): n is a, c, g, or t
  misc_feature (356)..(356): n is a, c, g, or t
  misc_feature (410)..(410): n is a, c, g, or t
  misc_feature (472)..(472): n is a, c, g, or t
  misc_feature (487)..(487): n is a, c, g, or t

SEQ ID NO: 5144 - DNA, 462 bp, Cricetulus griseus; identical to SEQ ID NO: 1502
  misc_feature (414)..(414): n is a, c, g, or t
  misc_feature (419)..(419): n is a, c, g, or t
  misc_feature (430)..(430): n is a, c, g, or t

SEQ ID NO: 5145 - DNA, 578 bp, Cricetulus griseus; identical to SEQ ID NO: 1503
  misc_feature (366)..(366): n is a, c, g, or t
  misc_feature (368)..(368): n is a, c, g, or t
  misc_feature (480)..(480): n is a, c, g, or t
  misc_feature (532)..(548): n is a, c, g, or t

SEQ ID NO: 5146 - DNA, 553 bp, Cricetulus griseus
  misc_feature (49)..(70): n is a, c, g, or t
  misc_feature (126)..(126): n is a, c, g, or t
acgactacactcattagggcgatattgggtaccgggtccccccctcgannnnnnnnnnnnnnnnnnnnnngcgctgcagcgagctcgcgagtacaacgcgcgcctgttcggtctggcgcagcgcancgcccgagcgttgctggactacggcgtcaccgccgacgcgcgcgctctgctggcgggacagcgccacctgctgacggcccaggatgagaacggagacacgccactgcacctggccattatccatgggcagactggagtcattgagcagatagcccatgtcatctgtcatgcccagtaccttggggtcatcaacctcactaaccacctgcaccagacacctctgcacctagcagtaatcactgggcagacaagggtggtgagcttcctgctgcaggtgggtgcagaccccacactgctggatcgacatggagactcggctgtgcacctggctctgcgggcaggtgctgaagccctaagcctgttgcaggtgctgttgcatagtggggcccatgctgtgccccaaatattgcacatgcctgattttgca

SEQ ID NO: 5147 - DNA, 487 bp, Cricetulus griseus; identical to SEQ ID NO: 1505
  misc_feature (34)..(34): n is a, c, g, or t
  misc_feature (85)..(85): n is a, c, g, or t
  misc_feature (111)..(111): n is a, c, g, or t
  misc_feature (115)..(115): n is a, c, g, or t
  misc_feature (117)..(117): n is a, c, g, or t
  misc_feature (141)..(141): n is a, c, g, or t
  misc_feature (153)..(153): n is a, c, g, or t
  misc_feature (312)..(312): n is a, c, g, or t
  misc_feature (331)..(331): n is a, c, g, or t
  misc_feature (357)..(357): n is a, c, g, or t
  misc_feature (375)..(375): n is a, c, g, or t
  misc_feature (414)..(414): n is a, c, g, or t

SEQ ID NO: 5148 - DNA, 506 bp, Cricetulus griseus
  misc_feature (230)..(272): n is a, c, g, or t
  misc_feature (401)..(401): n is a, c, g, or t
cagcaaggcccccaatgcatccaacctgaaaattgtacggatggacagaactgcaggatgtgtgactggaggagaagaaatttatcttctctgtgacaaggttcagaaagatgacatccagattcggttttatgaggaggaagagaatggtgggttttgggaaggatttggagacttttcccccacggatgttcacagacagtttgccattgtcttcaaaactccaaagnnnnnnnnnnnnnnnnnnnnnnnnnnnnnnnnnnnnnnnnnnnagcttcggaggaaatcggatttggaaactagtgaaccgaaacccttcctctactatcctgaaatcaaagacaaagaggaagtccagaggaaacgccagaagctcatgcccaacttctcggacagtttcngcggtggcagtggagccggagcgggcggtggaggcatgttccgtagtggcggtggtggagggagtacccggaagtcctggcccagggtatggcttctcgcactac

SEQ ID NO: 5149 - DNA, 524 bp, Cricetulus griseus
aagaaacagctgagtcaggctgctcagaggtctggactcccagcagtaactatttggggaacaaaaagatgagggctttatcatcccctaccaggtgaaagataaaattgcagaagccagacaacaccaaaagtagtgcaactggagttatgcaaccatccctcactccagcaaacggtgaagacttggtaggtaggacgctgtggaagttaaaggagatgtggcttatttggtagtgtggctagcatgcagaagccctggattggattcccagtatgacataaaccagcttatctatcatctcagcacttgggagatggaaagcaggaggacgagaagtttaaggtcatccttaaatacatagcaattctgaggccaacctgagttacataaaacctatctcaacaaaaagaatcacattgaagaagggtcccttgtagctccatcagattggctcatgccagcaggtggcggtgagggcataaactgagtggctttttcctgagtcactaaatcacgtgtgg

SEQ ID NO: 5150 - DNA, 389 bp, Cricetulus griseus
  misc_feature (150)..(150): n is a, c, g, or t
  misc_feature (236)..(236): n is a, c, g, or t
  misc_feature (299)..(299): n is a, c, g, or t
  misc_feature (305)..(305): n is a, c, g, or t
  misc_feature (338)..(338): n is a, c, g, or t
  misc_feature (341)..(341): n is a, c, g, or t
tggacaggtttcctgtgaacttgtttctccaaaactcaatagagcaacagaaggtattctgttttttaaccttgaactttctcagatggctgctccagcttttgaacccggcaggcagtccgatctcctggtgaagctgaatcgactctnggaaaggtgtctaagaaattcaaagtgtatagatactgaatctctctgtgttgttgctggtgaaaaggtttggcagatccgtgtanacctacatttattaaatcatgatggaaatattattgacgccgccagtattgctgcaatcgtanccttgngtcacttccgaagaccggatgtctctgtccaanganaggaagtaacactgttcactcctgaagagcgggaccctgtgccactga

SEQ ID NO: 5151 - DNA, 186 bp, Cricetulus griseus; identical to SEQ ID NO: 1509
  misc_feature (108)..(108): n is a, c, g, or t

SEQ ID NO: 5152 - DNA, 560 bp, Cricetulus griseus
atcagatcctactctcctcgttcgtgcgcctcgctcgctctttccggcaaccatgtctgacaaacccgatatggctgagatcgagaaattcgataagtcgaaattgaagaagacagaaacgcaagagaaaaatcctctgccttcaaaagaaacgattgaacaggagaagcaagctggcgaatcgtaatgaggcgagcgccgccaatatgcactgtacattccacaagcattgccttcttattttacttcttttagctgtttaactttgtaagatgcaaagaggttggatcaagtttaaatgactgtgctgcccctttcacatcaaagaatcagaactactgaccaggaaggcctcccctgcctctcccacccatctgtcggtctggctggcagggagggaaaagaacttgcatgttggtgaaagaaaaagctgggtgggaggtggtgaaatacagaaaaaaattcaagatggtccaaggtgtcctgcaggatgtaaaatgcagtttgatcagagtgccattttttttgttcaaatgattttaattattggaatgcacaat

SEQ ID NO: 5153 - DNA, 533 bp, Cricetulus griseus
gttgatgctgggaaaagtactctgatgggccatatgctttatcttctgggtaatgtaaacaaaagaactatgcataagtatgaacaagaatctaaaaaggctggcaaggcttcctttgcatatgcatgggtcttggatgagactggagaagaaagggaaaggggagtaacaatggatgttggcatgacaaagtttgaaaccacaaccaaagttattacattaatggatgctccaggccataaggatttcattcctaacatgatcactggagcagcccaggcggatgtagctgttttagttgttgatgccagcagaggagagtttgaagctggatttgagactggaggacagactcgagagcatggccttttagtacgatctcttggagtgacacagcttgctgttgctgtcaataaaatggatcaggtaaattggcaacaagaaagatttcaagagattactggaaaacttgggcactttcttaagcaagcaggttttaaggagagtgatgtagcttttatccctacgagtgg

SEQ ID NO: 5154 - DNA, 524 bp, Cricetulus griseus
atggagtggcaccacgtgccaaaatgaaccaacagcgttcaaggaggtttagagcatcaaaggaaggaatggaagcagcagttgagaagcagcgagtcagagaagaaatacttgcaaaaggtggctttcttcctccagaagaaataaaagaaagatttgacagcaactgtattacaccaggaactgagttcatggacaatcttgctaaatgccttcgctattacatagctgatcgtttaaataatgaccctgggtggaaaaatttgacagttatattatctgatgctagtgcacctggtgaaggagaacacaaaatcatggattatattagaagacaaagagcccagcctaaccatgacccaaatactcatcattgtttatgtggagctgatgctgatctcattatgcttggtcttgctacacatgaacctaacttcaccataatcagagaagaattcaaaccaaacaaacccaaaccatgtgctctttgtaatcagtttggacatgaggttaaggattgtgaa

SEQ ID NO: 5155 - DNA, 564 bp, Cricetulus griseus; identical to SEQ ID NO: 1513
  misc_feature (524)..(524): n is a, c, g, or t

SEQ ID NO: 5156 - DNA, 561 bp, Cricetulus griseus
  misc_feature (387)..(387): n is a, c, g, or t
  misc_feature (403)..(403): n is a, c, g, or t
gtcctgaacggagcctccttcccggccatggggctcctgtcggacccggtgcgccggcgcgcgctcgcccgcttcgtcttgcgcctcaacactccgctctgcgtgctgagctacgtggctggcatcacctggtttttggcgctggctttcccgcccctaacccagcgcacttacatgtctgagaacgccatgggctccaccatggtggaggagcagtttgtaggtggagaccgcgctcgaagctttgcccgggacttcgctgcacaccgtaggaagtcgggggctctgccagtggcctggctggagcggtcgatgcgatccgtagggctggaggtctacactcagagcttctcccgcaaactgccctttccggatgagacccacgancgctatatggtgtcangtaccaatgtgtatggcatcctgcgggccccacgtgctgccagcaccgagtctctggtacttactgtaccctgtggtccagactctacaaatagccaggctgtggggctgctgttggcacttgctgcccatttccgagggcagatttactgggccaaa

SEQ ID NO: 5157 - DNA, 278 bp, Cricetulus griseus
  misc_feature (159)..(159): n is a, c, g, or t
  misc_feature (190)..(190): n is a, c, g, or t
  misc_feature (213)..(213): n is a, c, g, or t
  misc_feature (227)..(227): n is a, c, g, or t
  misc_feature (250)..(250): n is a, c, g, or t
gggggggggtggggatggatgtggtcatcatcctggttttaaaaaataaaaattagaaaaggaaatcaaagtcaattgtctaagtttaaaaaaggggactgtccctgatcctcacaggtcagggacacctccaaaggcactcgaaaggccagaacacangattgacttaggcaggcgaggaggcctgganagctgggcacaggaggctagganttggggagggaaanaaagcaggccgggcccctctctnttaaggctgcagggttttggctccagga

SEQ ID NO: 5158 - DNA, 525 bp, Cricetulus griseus; identical to SEQ ID NO: 1516
  misc_feature (93)..(93): n is a, c, g, or t
  misc_feature (334)..(334): n is a, c, g, or t

SEQ ID NO: 5159 - DNA, 535 bp, Cricetulus griseus
  misc_feature (37)..(37): n is a, c, g, or t
  misc_feature (399)..(399): n is a, c, g, or t
cagttaagcacaatatattttttagtttgaagctcantgcttgcctcatacaaaagttcaaggacccattttccatcaggggttggtatggtaccatgaacatgtctttacacacatcttggtctgtattgaataacaactctcacaattcttactgaagcaattcagtctaaatactcaagtctcatctataaattgtagataatgattactacatcatggagtacttgtgcatcctgcatgaaataagttacttgaggctgatgtattcctttaataatgtaaaaagaatattgaattcagttcaggaccattacaagattttttttgattactttcagcttgggtgaagctttaaattcttagttaaattccttttctaaagcactcatttattgnctattatttttctagttatctaggtgcattggggaattaaaatcatcatttaaaaatcatcccatggatatcacaagctcataaattgttagatgctaatgggaaagccaagaatctgctccaacttattattgta

SEQ ID NO: 5160 - DNA, 580 bp, Cricetulus griseus; identical to SEQ ID NO: 1518
  misc_feature (554)..(554): n is a, c, g, or t

SEQ ID NO: 5161 - DNA, 193 bp, Cricetulus griseus
gttcccggtctcggttgccggacccgccttccctccctcggtttccccttgccgacctacgcctttggcttctcctctcgcgtttccgccggtccgcttacccgctggccgcctcctgacaagcgggagggttacggtgtggacccagagaagccgaggcgccaggcggctgccaccccctctccccacttgc

SEQ ID NO: 5162 - DNA, 580 bp, Cricetulus griseus; identical to SEQ ID NO: 1520

SEQ ID NO: 5163 - DNA, 578 bp, Cricetulus griseus; identical to SEQ ID NO: 1521
  misc_feature (522)..(522): n is a, c, g, or t
  misc_feature (551)..(551): n is a, c, g, or t

SEQ ID NO: 5164 - DNA, 558 bp, Cricetulus griseus
  misc_feature (408)..(408): n is a, c, g, or t
  misc_feature (453)..(453): n is a, c, g, or t
  misc_feature (502)..(502): n is a, c, g, or t
  misc_feature (520)..(520): n is a, c, g, or t
ttgggatagttgtgtgaggctggccccgttagcctctggagccctacctcggcaaatccaggctttggctagagttcaagttgagtttccctcttgtttatgtggccatggggcagtcaggaggggctcattgtccctctgttgtggcactggctgctcagtgtctgtgaagttgtggcccgtctgtgaagttgtggcccgtctgtgctaggcagagcagggcttgggcttgctcatggccccagaggcctgctcaggggctggatatgtccctgccaagtcactgcccatcagactcctctgttcctttctagtccacatatccctttgttaccagctcccttgtactcgtgggagggagcagctaccctgatctgtgtctacagttggaggctaccgtagttggangatgctgcgtccgccgttagccctgggggtggtaccacccttganggtttccaggtctttggccagacccagatcccagttagcctcttgttgngttatgttctaaaccaangcctttgctatgaagaagtgtttcatatgaaccatttt

SEQ ID NO: 5165 - DNA, 287 bp, Cricetulus griseus
  misc_feature (35)..(35): n is a, c, g, or t
  misc_feature (37)..(37): n is a, c, g, or t
  misc_feature (106)..(106): n is a, c, g, or t
  misc_feature (224)..(224): n is a, c, g, or t
gtggaaagaaaagttctagattaccaaactccagnangagtttggctgtagcctttatttgctgatctccatgccatgatgttagaacaacttctaagaaaccagnataaggggaaggaagacatccatgtacaattctcatcctgtcctccactttccatattagcacaggggctgctgtggctcacttgaatgcaggtggaaacattctcatcccatgagancttatccagggatcctgattttatagagggacctttatgggctctggcacttgctaggaatgg

SEQ ID NO: 5166 - DNA, 556 bp, Cricetulus griseus
  misc_feature (107)..(107): n is a, c, g, or t
  misc_feature (236)..(236): n is a, c, g, or t
  misc_feature (290)..(290): n is a, c, g, or t
acagagaacattaaagtaatagtttaagcttagggcttagctttaatcttatttggagtattaaacaggattctggatatcagcaatgtaatttaaaagtacaggcnaagggactggcattgtatattattggtaacacacttgtctggcatgcacaaggctctggatttagttcccagtgctgtttaaaacaacaaccacactagtaagcagtaaggagtttctctgttatatcngttgttatctgggaagcagggtggtttcactgttgaatatggactatatatagnatcagacctaggttcatttcttgaactcgtcataatacttacagcaatgtaatcaccgtctgttgagcatattgtgtacctgctaagtcattgatttttttgttatctcacttaattttctctgtaattctggaaggtaagtttagactcttcattttcctgttagagaaactgcagctaagagtaattacagagtgagctctatctctgatttctctctttatcctttctattatgtaatagtatttctttttttctctagctag

SEQ ID NO: 5167 - DNA, 373 bp, Cricetulus griseus
  misc_feature (112)..(112): n is a, c, g, or t
  misc_feature (214)..(214): n is a, c, g, or t
  misc_feature (283)..(283): n is a, c, g, or t
  misc_feature (314)..(314): n is a, c, g, or t
  misc_feature (328)..(328): n is a, c, g, or t
  misc_feature (343)..(343): n is a, c, g, or t
attgacatgtaaaataatcttgtttctaatttaaataaaaaatgggagggaaaaggagggagcaaacattcctctctttgctttcagatgaatcaatttgcccccttgtggnagtatgccaaagactaaattacagggccctcaatccaacaacatacccaagaagactaatgtcctgggagtttgttagacataaggttgaagtccccagggnacccttggtaaagctgcggcaagattctgtgctgtcttgaaataaaatggtcccaaaattatagatganggtggcatttgtgtttgtgtgtatgtgggantttgcaattaagantgtcctgtctcccanaactcacaagacataggcagatggatctct

SEQ ID NO: 5168 - DNA, 137 bp, Cricetulus griseus
  misc_feature (71)..(71): n is a, c, g, or t
  misc_feature (77)..(77): n is a, c, g, or t
  misc_feature (101)..(101): n is a, c, g, or t
  misc_feature (118)..(118): n is a, c, g, or t
  misc_feature (123)..(123): n is a, c, g, or t
tatgctctcctctggtttctcacttgaggatccccaaacccactccaaccgcatataccgcatgatcaaantaggcntgggtatcgatgaagatgaggtgncagcataggagcccagngctgntgttcctgatgaga

SEQ ID NO: 5169 - DNA, 518 bp, Cricetulus griseus
gcgtgggtttttgacataacattttctcagcatttttcacatctagtaacttaaaacattacacttaactgtgattctggtgactgctaataattttgtgagctcaacccctttttaaaattttatttatttttatatgtgtggtagttttgcctgcatttatgttccagtgagaccaggtattggatcccctgggattagagttgcagaaactgtgatctgctatgttaatatgggtcctgggatcaaacctgagtcctctggaagaacagccagtgctcttaactgccgaggcatctttctggtttcctcaaaactctttgtaaaatgaatattgttccatgactttcagtcttttatatttgctgtgattaagggaaaactacattctagtaaaagtgtttggtatagttaaccccaaaattcttaaccaaaataataaagtttgactaaatttataggttgcatataaagttgtagtaatggagcagagtcatatttaaaatacttttgtatta

SEQ ID NO: 5170 - DNA, 580 bp, Cricetulus griseus; identical to SEQ ID NO: 1528
  misc_feature (364)..(396): n is a, c, g, or t

SEQ ID NO: 5171 - DNA, 546 bp, Cricetulus griseus; identical to SEQ ID NO: 1529
  misc_feature (246)..(278): n is a, c, g, or t
  misc_feature (329)..(349): n is a, c, g, or t
  misc_feature (405)..(405): n is a, c, g, or t
  misc_feature (427)..(427): n is a, c, g, or t
  misc_feature (494)..(494): n is a, c, g, or t
  misc_feature (510)..(510): n is a, c, g, or t

SEQ ID NO: 5172 - DNA, 467 bp, Cricetulus griseus
  misc_feature (74)..(74): n is a, c, g, or t
  misc_feature (240)..(276): n is a, c, g, or t
  misc_feature (337)..(355): n is a, c, g, or t
ttctccccctaggttggggttacatgtgtcatcatgaatagcacttttttgcatggggtggcaatggtacttanaggcaagccagtttactgagtcacttcctaagcactaaattttgatttctttctttttaaaattaaaaaaacaaaaaccaagatattgtctaggcttttaaaagaattgttgacaaaagataacatcccctttagaaagtttttcattcgcctgcattggtggtgnnnnnnnnnnnnnnnnnnnnnnnnnnnnnnnnnnnnnatggatctctgggagttcgaggccagcctggtgtatagagagagttccaggacagccaggnnnnnnnnnnnnnnnnnnnccttgaaaaacaaaaacaaacaagccaaagaagctgggtgctgaggcctcaaaagataggaaggagcgaggttgagctcctcccctcctcctctcttgggctgatgctttca

SEQ ID NO: 5173 - DNA, 369 bp, Cricetulus griseus
  misc_feature (309)..(309): n is a, c, g, or t
aagtctgatgtcgaacttttaatgttttcagtgttctctaatttttaggagttttttgtagcctttacacctggaaaaaagatttgtaaaatcaccaaaataattgtgtgctttattttttaagtagtgattataggtgttacatcccatagttactgcaagatttattgccgtatattggagcagatgtctcattaacataagagtacttaggaagtgaagtccttttgtgcattttcaacatttatcaactggcaatcagaaaatgtttactgtgaagaggaatctccaacttacatagcccttttnggtatgtttaataattcttaatggggcttgcctgtaagtatgatatgcatagcatcttag

SEQ ID NO: 5174 - DNA, 517 bp, Cricetulus griseus; identical to SEQ ID NO: 1532
  misc_feature (351)..(351): n is a, c, g, or t
  misc_feature (416)..(416): n is a, c, g, or t
  misc_feature (423)..(423): n is a, c, g, or t
  misc_feature (432)..(432): n is a, c, g, or t
  misc_feature (447)..(447): n is a, c, g, or t

SEQ ID NO: 5175 - DNA, 508 bp, Cricetulus griseus
  misc_feature (114)..(152): n is a, c, g, or t
  misc_feature (467)..(467): n is a, c, g, or t
ctcaactccccacttcatcctccatgaaggcccatgttcattcctactctataccttggtcctactgatgctctattaccaaaggcctaaaggttaagtaggagtaacaccttnnnnnnnnnnnnnnnnnnnnnnnnnnnnnnnnnnnnnnnctcagctggctttctgggttttctcaggtaacctgcttcctcagggctgttcccacagaggcctcagggttatctcccccttagcaaagtccccactaggattgctggcttggggcctacagcagggctcctcagcctgcctgctgttgtgttacaggaaactcttggccaccgcatgtcccatggagccctgacatgtggtcagcatagcctttctccttggcttgggccttccaggtagccccatttggggtgcctgagtgcagacttctctgtgattgccctgtggttccttggttggacagtttcccccanaagaccacagggcaactgtcaagctgctcaccccttcccaa

SEQ ID NO: 5176 - DNA, 489 bp, Cricetulus griseus; identical to SEQ ID NO: 1534

SEQ ID NO: 5177 - DNA, 501 bp, Cricetulus griseus; identical to SEQ ID NO: 1535
  misc_feature (427)..(427): n is a, c, g, or t

SEQ ID NO: 5178 - DNA, 110 bp, Cricetulus griseus; identical to SEQ ID NO: 1536
  misc_feature (80)..(80): n is a, c, g, or t

SEQ ID NO: 5179 - DNA, 278 bp, Cricetulus griseus
  misc_feature (137)..(137): n is a, c, g, or t
gccccagcagcttctgctccagctcaggccaaaccagatctggaaaagcagacaaaagcttcccctaggaaaggcaccccagccacccctgcatctgccatggtctcctctatgcgagtgagcaccgcaccctctantgaggaggggtcaggagctgctcctggcactacaagggtgcaggggaagtctgtggggaagggcctccaagggaaaggtgacttgggacaagggatggccccagtgcaccctgagaggccggggcctacagttgcccatgt

SEQ ID NO: 5180 - DNA, 462 bp, Cricetulus griseus
  misc_feature (375)..(375): n is a, c, g, or t
  misc_feature (385)..(385): n is a, c, g, or t
  misc_feature (436)..(436): n is a, c, g, or t
gaggtccgttgtgtgagcaagctgctatggtgctgagttcccgggtagagtcgaccgagccggggcggtcgcggccatgaaggcgggtgctacttctatgtgggcttcatgctgtgggctgctgaatgaagtcatgggaactggagctgtcagaggtcagcaggcaggatttccaggaagcacggggccattcagatttacaccaagttctgactttcccacctacccaccagcagctactgaagggcccaatatagtttgcaaagcgtgtggactttcattttcagtctttataaagaagcacgtctgctgtgactgcaaaaaggacttttgctccttttgctcagtttcacaagaaaacctccgcagatgttntacttgtcanctactccaagagacagccttccagcgccctcagttgatgcgactgaaagtnaaggacctacggcagtatctcctcct

SEQ ID NO: 5181 - DNA, 555 bp, Cricetulus griseus
  misc_feature (33)..(67): n is a, c, g, or t
  misc_feature (333)..(333): n is a, c, g, or t
  misc_feature (393)..(393): n is a, c, g, or t
  misc_feature (492)..(492): n is a, c, g, or t
agggcgatattgggtaccgggtccccccctcgnnnnnnnnnnnnnnnnnnnnnnnnnnnnnnnnnnncttttctttcattgggggaaggcgtgaggaaagtaccaaacagcagcaggacttttaaactttaaatagacaggtctgggagcctgagccctccttttctttgacttcagcctccaaggagcctcaccgctttggcgcgccggcttcgctttcattaagcgaaagagaagtgcccagacatgggtgactggagtgccttggggaagcttctggacaaggtccaagcctactccaccgctggcgggaaggtgtggctgtccgtgctnttcatttttagaatcctgctgctggggacagcggttgagtcagcatggggtgatgagcantccgcctttcgctgtaacactcagcaacctggttgtgaaaatgtctgctacgacaagtccttccccatctctcacgtgcgcttctgggtccttcagatnatattcgtgtctgtgcccacgctcctgtatttggctcacgtgttctatgtgatgagaaaggaa

SEQ ID NO: 5182 - DNA, 562 bp, Cricetulus griseus
agtattttttaaaggaacaaaataagcatgaattaacttttcaatataagctatgacgtgtaatagttggttatgaattgtagtggcaccagctagcacctctgtcatttaaggatctttttgaatgcttttagaagaatcccttattttcaagggttaaaatgagcagacaaactattctttccctggctaaagctgctgtgggaaccctcagcttaggaaggtggaaatctgttggcgctttggtttagtgtagcacgggaatggaagtagaaaagttttattcagttctttgagtgctcagaaaatgcaatcagtgtattatatatgatgattcgtagtcagaatcaatgtattatacgtgatgattcatagtcatttgtagtcatcgaccctaaggctttttactaagaaactagctgaagattcacccttgaattaggtctggggaaatggccaccatcaggaggatttactttagaacaaaaatgaaattctagtctaactcaatagtgtgtggtgagtgtgcagaccatagggcattggtgagtgcctgcaattt

SEQ ID NO: 5183 - DNA, 580 bp, Cricetulus griseus; identical to SEQ ID NO: 1541
  misc_feature (346)..(346): n is a, c, g, or t
  misc_feature (427)..(427): n is a, c, g, or t
  misc_feature (510)..(510): n is a, c, g, or t
  misc_feature (534)..(534): n is a, c, g, or t

SEQ ID NO: 5184 - DNA, 371 bp, Cricetulus griseus
  misc_feature (45)..(45): n is a, c, g, or t
  misc_feature (124)..(124): n is a, c, g, or t
  misc_feature (220)..(220): n is a, c, g, or t
  misc_feature (338)..(338): n is a, c, g, or t
tacagtggccaggttgaatagcaggtgagctgaaggaaagaaganagttctggaaggagacgagacagaatcttgggtaaagaaggctaagactggggtctccatgcaagtgaaagtaccccanggacactgagtggaaggaaggcagaatgcacagggtccatccacactgagagaagaagcccttcacctgagggtgaaatctagaagctcagcatanaaaaggcctggggacttgaggaaccagtaaagtgaaaaaccataccagcaatgtctgaaaggccattggagccaacataagccattctcacagcatgaccacaacccatggtgctganacaaacactgtctaacagaaggcactgggcact

SEQ ID NO: 5185 - DNA, 313 bp, Cricetulus griseus
  misc_feature (153)..(153): n is a, c, g, or t
  misc_feature (203)..(203): n is a, c, g, or t
acaagctacaaaatctccagatggtgttaatagaagtgaagcatcccctcctcagtcgggcgacacacagtacctttgcacagaagctccagctccgagtgccttcagtggagtctctgtttcggagtcccataaaggaatctctgttctggncttctaaagagtctttagtgcgaacatcttccagagagtccctgagccancttgacctggactgtcccgctgccacctttgacccaccttctgatatggagagcgaggctgaagacgcaccaggcagctctgacagcctcaacagatagcagttgcttca

SEQ ID NO: 5186 - DNA, 551 bp, Cricetulus griseus
  misc_feature (72)..(72): n is a, c, g, or t
  misc_feature (434)..(434): n is a, c, g, or t
  misc_feature (473)..(492): n is a, c, g, or t
atacagaatttaaaagattcttctcttctggaaagtgataagaaaaggaaaggtaggccaaagggcaaaggnaaacaaaagaaagcacagagcatcttcaagtaagtagatggagaagtagaagctgttctgcagaagaaagctaaagcaaggagtatagagttacagatttccagtgtgaagtttgaagatgttggaggcaatgatgcaacattaaaagaagtctgcaaaatgctcatacacatgcgccacccggaagtataccaacaccttggtgtcaccccgcctcgtggagttctcttgcatggaccaccaggctgcgggaagacattacttgcacatgcaattgctggggaacttgacttgccaattctgaaagtggctgcaccagagattgtgtcaggagtttcaggggagtctgagcaaaagctcanagatttatttgaccaagctgtgtcaaacgccccctgtannnnnnnnnnnnnnnnnnnngatgctattacccccaaaagagaagttgcttcaaaagatatggaaagaagaattgtagc

SEQ ID NO: 5187 - DNA, 579 bp, Cricetulus griseus; identical to SEQ ID NO: 1545
  misc_feature (137)..(208): n is a, c, g, or t

SEQ ID NO: 5188 - DNA, 581 bp, Cricetulus griseus; identical to SEQ ID NO: 1546

SEQ ID NO: 5189 - DNA, 470 bp, Cricetulus griseus; identical to SEQ ID NO: 1547
  misc_feature (368)..(387): n is a, c, g, or t

SEQ ID NO: 5190 - DNA, 580 bp, Cricetulus griseus; identical to SEQ ID NO: 1548

SEQ ID NO: 5191 - DNA, 579 bp, Cricetulus griseus; identical to SEQ ID NO: 1549

SEQ ID NO: 5192 - DNA, 571 bp, Cricetulus griseus
cacgtgacttcctacactgtgaaccatggccctgccattccggaaggacttaactgagtataaggacctggatgaagatgagctccttaacaatctgtcagaaacagagctgaaacagcttgaaactgtcctggatgatctcgaccccgagaatgctcttctgcctgcagggtttcggcagaagaaccagacgtcaaagtctgccacgggaccctttgatagagaacatctgctttcttatctagagaaggaagcattggaacataaagaccgggaagactatgtgcccttcactggagagaaaaaagggaaaatttttatccccaaacagaaacctgtgcagacttttgcagaagaaagcatatcccttgatccagaattagaagaagctttgacaagtgcctctgatacagaattgtgtgatcttgcagctatccttgggatgcacaatctgattacagacacacagttctaggacgtggtgagaagtagtaatggtgtcaaccaagaacatttttcaaatgtggtaaaaggtgaaacgattcttccagtgtttgatcagccaccaaat

SEQ ID NO: 5193 - DNA, 147 bp, Cricetulus griseus; identical to SEQ ID NO: 1551

SEQ ID NO: 5194 - DNA, 147 bp, Cricetulus griseus
accctcctccattattcaagagtctggggcaagaggaactccttttagggaagaaaacaggggttctccaagaagcaggctaaaagaagttcgttcaaaagatacaccctctcctcctcctcccgggaacggtcgtggggtacgaac

SEQ ID NO: 5195 - DNA, 194 bp, Cricetulus griseus
ggaaggttttccttcaaaaagttaagtgatgccagttgatcccccatccacaaatttaaagtggatacccgggtgccctcctccaaaccaaacattttaaaaacccccctttgttaaagttaaataaaaaaggaagggtttgaaccccctaaaattgggttcaaacccactccaaaacctttatgtttttttcc

SEQ ID NO: 5196 - DNA, 580 bp, Cricetulus griseus; identical to SEQ ID NO: 1554
  misc_feature (467)..(481): n is a, c, g, or t

SEQ ID NO: 5197 - DNA, 580 bp, Cricetulus griseus
  misc_feature (100)..(114): n is a, c, g, or t
gtagtactccattgtataaatgtaccacattttctctacccattcttcagtgaaggggcatataggttgcttccaggttctggctattacaaacaatgcnnnnnnnnnnnnnnntgaacatatatgtccttgttgtatgaatgtgcattgagtacgtgcccaagagaggaattgctggatcttgaggcagactgattcccatttttctgagcaaccgctatactgatttctaaagtggtcttacaagttcgcactcccaccaccaatggaggagtattcctttttctccacatcctctccagcatagatcttcattggttgttacagtaaatctttctgccaaaagccacagagccccaccgccacgtgtatgctttacgcaagctgcctgcccaagttagggcccaaatgaatacacagaaacttgtattaagttcaaagctgcttggccaatgactaggattctcatctgctagctcagtcttaactgtcataaatctatatattttataagacttatcttatcggaagccttattggcgtccctccttgctgtggatcacatcgtgctactggaaca

SEQ ID NO: 5198 - DNA, 239 bp, Cricetulus griseus
cgcgtccggagcaaccctgtctcacaatgacgaaaccaaaaacagacggacgcaacccactgagctattctacccaccgctgtaactcatattttaaagggactttctataattgagctccaaaactagatatcctatcattcccaacagtcccttcagatctgcactatacaaggtatagagaatctcgttttgtgcccgttatccatgctgaataccatggcgattctacttcacca

SEQ ID NO: 5199 - DNA, 576 bp, Cricetulus griseus; identical to SEQ ID NO: 1557
  misc_feature (225)..(240): n is a, c, g, or t

SEQ ID NO: 5200 - DNA, 579 bp, Cricetulus griseus; identical to SEQ ID NO: 1558

SEQ ID NO: 5201 - DNA, 362 bp, Cricetulus griseus; identical to SEQ ID NO: 1559
  misc_feature (228)..(252): n is a, c, g, or t
  misc_feature (255)..(267): n is a, c, g, or t

SEQ ID NO: 5202 - DNA, 570 bp, Cricetulus griseus; identical to SEQ ID NO: 1560
  misc_feature (50)..(78): n is a, c, g, or t
  misc_feature (114)..(150): n is a, c, g, or t
  misc_feature (210)..(244): n is a, c, g, or t
  misc_feature (291)..(341): n is a, c, g, or t
  misc_feature (436)..(467): n is a, c, g, or t

SEQ ID NO: 5203 - DNA, 568 bp, Cricetulus griseus; identical to SEQ ID NO: 1561

SEQ ID NO: 5204 - DNA, 455 bp, Cricetulus griseus
  misc_feature (330)..(356): n is a, c, g, or t
  misc_feature (358)..(371): n is a, c, g, or t
aaaaatatactcgcacatatcatgcgccacacacactgagaacatccgctctgtgtatgctgccgtcaagaacaccatctcgcatataaacgtgaaggagagcaatatggtctaaatgtgcgtcccagaaaccattcttcccttccctgtgggctgtggaagataaccaagaagaactgtgtgtctgtgtaaaacaatttgcataaaactaatatatagccgttctggactctgtgagagagtccacacagctgtagaaaatattataattttatataaactattcacagagaacagaatgttgaagagcagtcccagcacatttcttcnnnnnnnnnnnnnnnnnnnnnnnnnnntnnnnnnnnnnnnnntcccttttttagacaaaccctatgactcaatgtattttaaattttcagtcattcacaatataaaagcactcatgtcatttctgt

SEQ ID NO: 5205 - DNA, 579 bp, Cricetulus griseus; identical to SEQ ID NO: 1563

SEQ ID NO: 5206 - DNA, 579 bp, Cricetulus griseus; identical to SEQ ID NO: 1564
  misc_feature (547)..(547): n is a, c, g, or t

SEQ ID NO: 5207 - DNA, 600 bp, Cricetulus griseus; identical to SEQ ID NO: 1565
  misc_feature (286)..(305): n is a, c, g, or t

SEQ ID NO: 5208 - DNA, 547 bp, Cricetulus griseus
ccaggttcctccttaagtttctgccatgtcttctctgaataataggttactaactgtacaatgaaataaatcctttctcccaagttgcttttggtcaaagtgccccctccacaggaatagaaaccctaactaaaccaacctcagactaatactaattttttgaaatactgttattgtgaaatattgttactatgtagccccaactcaaaagaaaaaataaatttcaatacatgtatttctgtggaatatagaatgttcaaaatttgtgaaaactgaagtatttctgcctggtgagtcattttcaattttaatactctttttattatcaaattatatcttcatatcttgtcattgtctgggcctaatttattaggcaattctaaaataaccagggctcttcttataccaatttaaattatatccactgttaaattgtaagtaaagtctatgaaaataaaatcattttagattttttaagttatttatatttaaaaaatcacttcacctaccattgttaacatgtaaatacagagtgaaacatctcact

SEQ ID NO: 5209 - DNA, 204 bp, Cricetulus griseus
aaaaataaacttttatttaaattaaaaacaattttattttgtataccaatcccagttcccactccctccctcccatgccctcccaaccccccttcccacccctgtccactccccatggagggtgaggcctcccatgggggatcatcaaagtttgacacattcatcatttagagaaagccctaagccctaacctgtgtatctagg

SEQ ID NO: 5210 - DNA, 568 bp, Cricetulus griseus; identical to SEQ ID NO: 1568
  misc_feature (62)..(208): n is a, c, g, or t
  misc_feature (231)..(288): n is a, c, g, or t
  misc_feature (303)..(436): n is a, c, g, or t
  misc_feature (491)..(508): n is a, c, g, or t

SEQ ID NO: 5211 - DNA, 567 bp, Cricetulus griseus; identical to SEQ ID NO: 1569
  misc_feature (182)..(201): n is a, c, g, or t

SEQ ID NO: 5212 - DNA, 567 bp, Cricetulus griseus
  misc_feature (367)..(386): n is a, c, g, or t
cagttccttatgtgatggtgacctggccccccaaccataaaattatttcattgctacttcataattgtaattttgctactgttatgaatcataatcaaatatctgatatgcaggacatctaatatcaaccaccactggcttaaaatctgaatttttcctctaatttaaaatacagcattacccctttttaaacagaaaaataaaaactctccaacataaatactggtattaatattcaactcgaacagtcttttataccaaattttgtttatgcctttggctccaatttatgattcaattcattctaaggatacataacaggtaagggaagaagtgcttctgcttcaactggtacccttactaaggnnnnnnnnnnnnnnnnnnnntacaaactttgtgaaagaacttttttttttagctattgggatgtcttctggaggtggctatggagttaacccctttaatctcagccttttgaagcaaaggcaggcaaatctctgagttccaggccataaattgagaggaagacccaaaacaataaataagaatatcttaatgctgcctagg

SEQ ID NO: 5213 - DNA, 569 bp, Cricetulus griseus; identical to SEQ ID NO: 1571

SEQ ID NO: 5214 - DNA, 554 bp, Cricetulus griseus; identical to SEQ ID NO: 1572

SEQ ID NO: 5215 - DNA, 580 bp, Cricetulus griseus; identical to SEQ ID NO: 1573

SEQ ID NO: 5216 - DNA, 174 bp, Cricetulus griseus; identical to SEQ ID NO: 1574
  misc_feature (119)..(137): n is a, c, g, or t

SEQ ID NO: 5217 - DNA, 555 bp, Cricetulus griseus; identical to SEQ ID NO: 1575

SEQ ID NO: 5218 - DNA, 578 bp, Cricetulus griseus; identical to SEQ ID NO: 1576

SEQ ID NO: 5219 - DNA, 493 bp, Cricetulus griseus; identical to SEQ ID NO: 1577

SEQ ID NO: 5220 - DNA, 600 bp, Cricetulus griseus; identical to SEQ ID NO: 1578

SEQ ID NO: 5221 - DNA, 562 bp, Cricetulus griseus; identical to SEQ ID NO: 1579

SEQ ID NO: 5222 - DNA, 503 bp, Cricetulus griseus; identical to SEQ ID NO: 1580

SEQ ID NO: 5223 - DNA, 505 bp, Cricetulus griseus; identical to SEQ ID NO: 1581

SEQ ID NO: 5224 - DNA, 505 bp, Cricetulus griseus; identical to SEQ ID NO: 1582
  misc_feature (133)..(153): n is a, c, g, or t

SEQ ID NO: 5225 - DNA, 505 bp, Cricetulus griseus; identical to SEQ ID NO: 1583

SEQ ID NO: 5226 - DNA, 578 bp, Cricetulus griseus; identical to SEQ ID NO: 1584

SEQ ID NO: 5227 - DNA, 579 bp, Cricetulus griseus; identical to SEQ ID NO: 1585

SEQ ID NO: 5228 - DNA, 566 bp, Cricetulus griseus; identical to SEQ ID NO: 1586

SEQ ID NO: 5229 - DNA, 578 bp, Cricetulus griseus; identical to SEQ ID NO: 1587

SEQ ID NO: 5230 - DNA, 579 bp, Cricetulus griseus; identical to SEQ ID NO: 1588

SEQ ID NO: 5231 - DNA, 579 bp, Cricetulus griseus; identical to SEQ ID NO: 1589
  misc_feature (257)..(293): n is a, c, g, or t

SEQ ID NO: 5232 - DNA, 600 bp, Cricetulus griseus; identical to SEQ ID NO: 1590
  misc_feature (499)..(499): n is a, c, g, or t

SEQ ID NO: 5233 - DNA, 565 bp, Cricetulus griseus; identical to SEQ ID NO: 1591

SEQ ID NO: 5234 - DNA, 578 bp, Cricetulus griseus; identical to SEQ ID NO: 1592

SEQ ID NO: 5235 - DNA, 579 bp, Cricetulus griseus; identical to SEQ ID NO: 1593

SEQ ID NO: 5236 - DNA, 521 bp, Cricetulus griseus
  misc_feature (27)..(80): n is a, c, g, or t
  misc_feature (93)..(161): n is a, c, g, or t
  misc_feature (173)..(241): n is a, c, g, or t
  misc_feature (254)..(307): n is a, c, g, or t
  misc_feature (362)..(399): n is a, c, g, or t
aatgtctacgcttctatgtttaaaaannnnnnnnnnnnnnnnnnnnnnnnnnnnnnnnnnnnnnnnnnnnnnnnnnnnnncgataggtatgtnnnnnnnnnnnnnnnnnnnnnnnnnnnnnnnnnnnnnnnnnnnnnnnnnnnnnnnnnnnnnnnnnnnnngtagtgtcaaannnnnnnnnnnnnnnnnnnnnnnnnnnnnnnnnnnnnnnnnnnnnnnnnnnnnnnnnnnnnnnnnnnnnatactcctacctnnnnnnnnnnnnnnnnnnnnnnnnnnnnnnnnnnnnnnnnnnnnnnnnnnnnnnttcttaaccaatactttatctatagcaactttatgacacataaaccaaacacgcnnnnnnnnnnnnnnnnnnnnnnnnnnnnnnnnnnnnnnctgatcataaattatatcagttactctgacttttaccacttatactacctacctggtcgaaatgatcattaactaacgaaaccgactaccccacacaaccgtatattttctctacctaacct

SEQ ID NO: 5237 - DNA, 578 bp, Cricetulus griseus; identical to SEQ ID NO: 1595
  misc_feature (525)..(525): n is a, c, g, or t

SEQ ID NO: 5238 - DNA, 579 bp, Cricetulus griseus; identical to SEQ ID NO: 1596
  misc_feature (258)..(278): n is a, c, g, or t
  misc_feature (309)..(331): n is a, c, g, or t

SEQ ID NO: 5239 - DNA, 580 bp, Cricetulus griseus; identical to SEQ ID NO: 1597

SEQ ID NO: 5240 - DNA, 579 bp, Cricetulus griseus; identical to SEQ ID NO: 1598

SEQ ID NO: 5241 - DNA, 86 bp, Cricetulus griseus; identical to SEQ ID NO: 1599

SEQ ID NO: 5242 - DNA, 234 bp, Cricetulus griseus; identical to SEQ ID NO: 1600

SEQ ID NO: 5243 - DNA, 210 bp, Cricetulus griseus; identical to SEQ ID NO: 1601

SEQ ID NO: 5244 - DNA, 477 bp, Cricetulus griseus
gattatgatcaaggggggcgtgtggaggaataccgaggatgagagggtgaaagcagcggtaatgaaatatgggaaaaaccacaggtctaagattgcctcattgctgcataggaaatcggcaaagcagtgcaaagccagatggtatgaatggctggatccaagcattaaaaaaactgagtggtctagagaagaggaagaaaaactgttacacttggccaagctgatgccaacgcagaggaggaccattgctccaatcattggaagaacagcagccccatgttcggagcactatgaattcctcctggacaaaactgcccaaagggaccatgaggaggaaacaacagatgacccccgaaagcttaaaacctggagaaatagacccaattccagacacaaaaccacctcggcctgaccccattgatatggatgaagaagaacctgaaacgctttcttaagcttcgacccccccgtggttaa

SEQ ID NO: 5245 - DNA, 580 bp, Cricetulus griseus; identical to SEQ ID NO: 1603

SEQ ID NO: 5246 - DNA, 581 bp, Cricetulus griseus; identical to SEQ ID NO: 1604
  misc_feature (283)..(324): n is a, c, g, or t

SEQ ID NO: 5247 - DNA, 569 bp, Cricetulus griseus; identical to SEQ ID NO: 1605
  misc_feature (29)..(47): n is a, c, g, or t
  misc_feature (84)..(129): n is a, c, g, or t
  misc_feature (162)..(288): n is a, c, g, or t
  misc_feature (301)..(381): n is a, c, g, or t
  misc_feature (383)..(441): n is a, c, g, or t
  misc_feature (449)..(486): n is a, c, g, or t
  misc_feature (500)..(524): n is a, c, g, or t

SEQ ID NO: 5248 - DNA, 580 bp, Cricetulus griseus; identical to SEQ ID NO: 1606
  misc_feature (122)..(137): n is a, c, g, or t
  misc_feature (139)..(161): n is a, c, g, or t

SEQ ID NO: 5249 - DNA, 579 bp, Cricetulus griseus; identical to SEQ ID NO: 1607
  misc_feature (305)..(345): n is a, c, g, or t
  misc_feature (365)..(380): n is a, c, g, or t

SEQ ID NO: 5250 - DNA, 579 bp, Cricetulus griseus; identical to SEQ ID NO: 1608
  misc_feature (44)..(77): n is a, c, g, or t
  misc_feature (515)..(537): n is a, c, g, or t

SEQ ID NO: 5251 - DNA, 488 bp, Cricetulus griseus
  misc_feature (28)..(84): n is a, c, g, or t
  misc_feature (88)..(106): n is a, c, g, or t
  misc_feature (123)..(186): n is a, c, g, or t
  misc_feature (189)..(231): n is a, c, g, or t
  misc_feature (233)..(247): n is a, c, g, or t
  misc_feature (249)..(265): n is a, c, g, or t
gtccctttttagtgaagggttaattgcnnnnnnnnnnnnnnnnnnnnnnnnnnnnnnnnnnnnnnnnnnnnnnnnnnnnnnnnnattnnnnnnnnnnnnnnnnnnnctatacattacgcgtgnnnnnnnnnnnnnnnnnnnnnnnnnnnnnnnnnnnnnnnnnnnnnnnnnnnnnnnnnnnnnnnnatnnnnnnnnnnnnnnnnnnnnnnnnnnnnnnnnnnnnnnnnnnngnnnnnnnnnnnnnnnannnnnnnnnnnnnnnnncgttaatacactattatagaaacccgaaacgtggggtttggccctctatttcgcagtattaccaccccttttttgggcttgtacctcccagaggggaattacttttttgggggcccacgaacaattaacctttttcacctttcccttatattggcccccccttaaaaaaaaatctggggggggttctttgggaaaaaacccccctaaccccgcttttgggatt

SEQ ID NO: 5252 - DNA, 579 bp, Cricetulus griseus; identical to SEQ ID NO: 1610
  misc_feature (528)..(528): n is a, c, g, or t

SEQ ID NO: 5253 - DNA, 567 bp, Cricetulus griseus; identical to SEQ ID NO: 1611
  misc_feature (385)..(403): n is a, c, g, or t

SEQ ID NO: 5254 - DNA, 580 bp, Cricetulus griseus; identical to SEQ ID NO: 1612

SEQ ID NO: 5255 - DNA, 566 bp, Cricetulus griseus; identical to SEQ ID NO: 1613

SEQ ID NO: 5256 - DNA, 581 bp, Cricetulus griseus; identical to SEQ ID NO: 1614

SEQ ID NO: 5257 - DNA, 578 bp, Cricetulus griseus; identical to SEQ ID NO: 1615

SEQ ID NO: 5258 - DNA, 580 bp, Cricetulus griseus; identical to SEQ ID NO: 1616

SEQ ID NO: 5259 - DNA, 578 bp, Cricetulus griseus; identical to SEQ ID NO: 1617
  misc_feature (181)..(208): n is a, c, g, or t

SEQ ID NO: 5260 - DNA, 578 bp, Cricetulus griseus; identical to SEQ ID NO: 1618

SEQ ID NO: 5261 - DNA, 566 bp, Cricetulus griseus; identical to SEQ ID NO: 1619

SEQ ID NO: 5262 - DNA, 580 bp, Cricetulus griseus; identical to SEQ ID NO: 1620
  misc_feature (527)..(527): n is a, c, g, or t
  misc_feature (545)..(545): n is a, c, g, or t

SEQ ID NO: 5263 - DNA, 578 bp, Cricetulus griseus; identical to SEQ ID NO: 1621

SEQ ID NO: 5264 - DNA, 578 bp, Cricetulus griseus; identical to SEQ ID NO: 1622

SEQ ID NO: 5265 - DNA, 579 bp, Cricetulus griseus; identical to SEQ ID NO: 1623

SEQ ID NO: 5266 - DNA, 235 bp, Cricetulus griseus; identical to SEQ ID NO: 1624

SEQ ID NO: 5267 - DNA, 579 bp, Cricetulus griseus; identical to SEQ ID NO: 1625
  misc_feature (280)..(299): n is a, c, g, or t

SEQ ID NO: 5268 - DNA, 579 bp, Cricetulus griseus
  misc_feature (281)..(300): n is a, c, g, or t
tcatacaacttaatgaagctggaatcactgctaattacataaaagctgtatgtttatgccaaagcctatgcaattcatatggaattcttgtcacacaaataagaaacaaatgacatgcttgataaaataagaaaataagctgatatgtgagtgatgaagactccataggggggatccatgtttgtttgtttttttaagacttatttattatttatacagtggtctgcctgtaggccagaagaggacaccagatcattatggatggttgtgagtcaccatgnnnnnnnnnnnnnnnnnnnntaaggacctttggaagagcagccagtgcttttaacctctgagctgtctctccagtctaaattcacatgtttgctccagttgttaaagtaattttaagctatgcaatctcctctgtcttcctccaggtggacctctgtatcagtgctctaaccatgcccaggtcctacaaattcctctgctcactcgcgttattgggtcccccattgtctcacttaggctttctattgttgtgatgaaacatcatgaccatagcaactcttataaagggaaatatttaat

SEQ ID NO: 5269 - DNA, 578 bp, Cricetulus griseus; identical to SEQ ID NO: 1627
  misc_feature (275)..(298): n is a, c, g, or t
  misc_feature (303)..(335): n is a, c, g, or t
  misc_feature (436)..(456): n is a, c, g, or t
  misc_feature (463)..(482): n is a, c, g, or t

SEQ ID NO: 5270 - DNA, 493 bp, Cricetulus griseus; identical to SEQ ID NO: 1628

SEQ ID NO: 5271 - DNA, 577 bp, Cricetulus griseus; identical to SEQ ID NO: 1629

SEQ ID NO: 5272 - DNA, 317 bp, Cricetulus griseus; identical to SEQ ID NO: 1630

SEQ ID NO: 5273 - DNA, 579 bp, Cricetulus griseus; identical to SEQ ID NO: 1631

SEQ ID NO: 5274 - DNA, 579 bp, Cricetulus griseus; identical to SEQ ID NO: 1632

SEQ ID NO: 5275 - DNA, 580 bp, Cricetulus griseus; identical to SEQ ID NO: 1633
  misc_feature (180)..(202): n is a, c, g, or t

SEQ ID NO: 5276 - DNA, 470 bp, Cricetulus griseus; identical to SEQ ID NO: 1634
  misc_feature (285)..(285): n is a, c, g, or t

SEQ ID NO: 5277 - DNA, 579 bp, Cricetulus griseus; identical to SEQ ID NO: 1635

SEQ ID NO: 5278 - DNA, 578 bp, Cricetulus griseus; identical to SEQ ID NO: 1636

SEQ ID NO: 5279 - DNA, 312 bp, Cricetulus griseus; identical to SEQ ID NO: 1637

SEQ ID NO: 5280 - DNA, 291 bp, Cricetulus griseus; identical to SEQ ID NO: 1638
  misc_feature (72)..(87): n is a, c, g, or t

SEQ ID NO: 5281 - DNA, 578 bp, Cricetulus griseus; identical to SEQ ID NO: 1639

SEQ ID NO: 5282 - DNA, 566 bp, Cricetulus griseus; identical to SEQ ID NO: 1640
  misc_feature (484)..(500): n is a, c, g, or t

SEQ ID NO: 5283 - DNA, 578 bp, Cricetulus griseus; identical to SEQ ID NO: 1641

SEQ ID NO: 5284 - DNA, 188 bp, Cricetulus griseus; identical to SEQ ID NO: 1642

SEQ ID NO: 5285 - DNA, 579 bp, Cricetulus griseus; identical to SEQ ID NO: 1643
  misc_feature (399)..(418): n is a, c, g, or t

SEQ ID NO: 5286 - DNA, 577 bp, Cricetulus griseus; identical to SEQ ID NO: 1644
  misc_feature (196)..(215): n is a, c, g, or t

SEQ ID NO: 5287 - DNA, 360 bp, Cricetulus griseus
tggcttccgttaccgtcctccccgtgtgagacaaccccccaccctaccccaccccaccccaccccgagaccgtgtcctttgtttataaaccacacttggtttttccggccggtttgctgccccgctgaggtggacaggcgctagtgtaatggcggggagtcttccttgggtggcaagcaggatcctgtggggcctgacgcccttggcgagctttataagcttctcgcagggagtcccgctgctgacccgcgtcaggctcacccttccgtcccccatagtgttggattgctgggacgagaagagggctctgtttggagtatatgacaacttcggaattctggggaatttcgataagctccc

SEQ ID NO: 5288 - DNA, 484 bp, Cricetulus griseus
  misc_feature (96)..(123): n is a, c, g, or t
  misc_feature (157)..(184): n is a, c, g, or t
  misc_feature (232)..(276): n is a, c, g, or t
agggggtggggaatagtatgaccaagatgacaacttgaacaaacaaattatttttctaattcattgttctgatgctagaatattctgtatcactgnnnnnnnnnnnnnnnnnnnnnnnnnnnngtttggttttggttttggttttggtttttcgaannnnnnnnnnnnnnnnnnnnnnnnnnnnatgtcctggcgctcgctctggaaaccaggctggcttcgaactcacaannnnnnnnnnnnnnnnnnnnnnnnnnnnnnnnnnnnnnnnnnnnncgccaccaacgcccagcttgtatcattggattttaatgaaacagaaaacattgaaaagttctctttaaaggacacaactgggctctgcagataaaatataactcactatctttaatatgaaaaatcaatagaattaccattgaaatttcttccacaactcaaaaataaaatttatgcaatggtatttaaaaatttctgcattaaacat

SEQ ID NO: 5289 - DNA, 545 bp, Cricetulus griseus; identical to SEQ ID NO: 1647

SEQ ID NO: 5290 - DNA, 579 bp, Cricetulus griseus; identical to SEQ ID NO: 1648

SEQ ID NO: 5291 - DNA, 161 bp, Cricetulus griseus; identical to SEQ ID NO: 1649

SEQ ID NO: 5292 - DNA, 579 bp, Cricetulus griseus; identical to SEQ ID NO: 1650

SEQ ID NO: 5293 - DNA, 579 bp, Cricetulus griseus; identical to SEQ ID NO: 1651

SEQ ID NO: 5294 - DNA, 580 bp, Cricetulus griseus; identical to SEQ ID NO: 1652
  misc_feature (513)..(513): n is a, c, g, or t

SEQ ID NO: 5295 - DNA, 86 bp, Cricetulus griseus
ttcgataggtatacattcaaatcctatcgcaattctggtgttagcagcatgctaagccgcactaggctaggccctacttgtactag

SEQ ID NO: 5296 - DNA, 579 bp, Cricetulus griseus; identical to SEQ ID NO: 1654

SEQ ID NO: 5297 - DNA, 579 bp, Cricetulus griseus; identical to SEQ ID NO: 1655
  misc_feature (76)..(94): n is a, c, g, or t
  misc_feature (274)..(293): n is a, c, g, or t
  misc_feature (486)..(486): n is a, c, g, or t

SEQ ID NO: 5298 - DNA, 184 bp, Cricetulus griseus
acgacaagacgcaaatactgcagccctacaggcaacgggatattatttcattgagtacgtgggctttgttatagtaataacaagcctgcgcctagttacaatttctgatacacaatcaaatcttatatcataaaacaaaagcctcattcctttactatgcttacttgtagcagcaaccagtaaa

SEQ ID NO: 5299 - DNA, 579 bp, Cricetulus griseus; identical to SEQ ID NO: 1657

SEQ ID NO: 5300 - DNA, 120 bp, Cricetulus griseus
tcatcatttattatattagcttttctgacttccaccccttatactactagctatccaaattcctatttttaaatattcccacttcatcaaagaacctgttcccgctgtactaatcactcc

SEQ ID NO: 5301 - DNA, 579 bp, Cricetulus griseus; identical to SEQ ID NO: 1659

SEQ ID NO: 5302 - DNA, 545 bp, Cricetulus griseus; identical to SEQ ID NO: 1660
  misc_feature (297)..(331): n is a, c, g, or t
  misc_feature (333)..(345): n is a, c, g, or t
  misc_feature (376)..(376): n is a, c, g, or t

SEQ ID NO: 5303 - DNA, 578 bp, Cricetulus griseus; identical to SEQ ID NO: 1661

SEQ ID NO: 5304 - DNA, 538 bp, Cricetulus griseus
  misc_feature (506)..(506): n is a, c, g, or t
acagaaggatagtactttctgttccgagtggtagagaagactgtcaccaggggttgtggctttcacctgccagatcccaagacaccaggtctctacgcttccacctttcttaaccgtgccttggattgcttatctgttttatataaatagagtaaatattatagtatataattctaacaactcacattcaggccactgtaaaagcttaatttcaaactggttttcattgtttcagagagtaaatatttactatatgttactatatattacaacacaaaacttttacctagggccagcaagctgactcaatggataaaggtgcttgctaccccacctgacgacatgtgctccatccccagtccccatattggaaggagacatccaactcctgcaagttgtcctttgacctccacgtgtgcttagtgacacacacaagtgtgtactcgggcacacacgcacgcgctcgcgctctcactagtcctcattcacatatcacacacttcttntattataaattatgtctcctctcatgtggtga

SEQ ID NO: 5305 - DNA, 578 bp, Cricetulus griseus; identical to SEQ ID NO: 1663

SEQ ID NO: 5306 - DNA, 579 bp, Cricetulus griseus; identical to SEQ ID NO: 1664
  misc_feature (418)..(418): n is a, c, g, or t

SEQ ID NO: 5307 - DNA, 579 bp, Cricetulus griseus; identical to SEQ ID NO: 1665

SEQ ID NO: 5308 - DNA, 579 bp, Cricetulus griseus; identical to SEQ ID NO: 1666

SEQ ID NO: 5309 - DNA, 344 bp, Cricetulus griseus; identical to SEQ ID NO: 1667
  misc_feature (36)..(36): n is a, c, g, or t

SEQ ID NO: 5310 - DNA, 579 bp, Cricetulus griseus; identical to SEQ ID NO: 1668
  misc_feature (116)..(130): n is a, c, g, or t

SEQ ID NO: 5311 - DNA, 578 bp, Cricetulus griseus; identical to SEQ ID NO: 1669

SEQ ID NO: 5312 - DNA, 580 bp, Cricetulus griseus; identical to SEQ ID NO: 1670
  misc_feature (177)..(220): n is a, c, g, or t

SEQ ID NO: 5313 - DNA, 578 bp, Cricetulus griseus; identical to SEQ ID NO: 1671

SEQ ID NO: 5314 - DNA, 507 bp, Cricetulus griseus
  misc_feature (398)..(416): n is a, c, g, or t
  misc_feature (436)..(453): n is a, c, g, or t
caaggcagagctcttggtccccagactgatagctgggataccagcacgggactgatccagacctcaggaacttgggtcaatgaggaggccttggaaatcatggggccttctgtagtagatcagtacttctctgtagcataggtgtggactttgggagcccatcccacacggagggatagtccctgagccaagacacatggggggggacctaggccctatcccaaaggatatgatagactctgatgaccccctatggaaagcctcaccctccccggggagcagcaaggatatgtgataggtagagttttatttgggagggtggtacgggaggaggagagggagagggaactgggattcacatgtaaaacaatcttgtttctaattccaataaaaaactnnnnnnnnnnnnnnnnnnncggccgcccccggggggacnnnnnnnnnnnnnnnnnncttaagagggttatttgcgcccttggcgaattaatgggaataacgtgttccctg

SEQ ID NO: 5315 - DNA, 518 bp, Cricetulus griseus
aaatctgttctattttcattactactgaagttgaacctagtaatcattggccatttgtatctggcctgtgtgaatggtatgttcatattctgtgttcattatttcactagaatgtttttcattatttttaattctgtgtgtgtttctgtctgtctctttaggagtgcatgtgtatatgagtgtgggtacctgcagaggccagaggtagatgctcttggagctacagatatggacagttgtaaatggcctcacatgagtgttgaaaactgaacacaggtctactgcaagagcagcaagtgctcttagctgctaagccatctctccagacccccaaaatacttctttttaagtgggtctataagaaaccagggccttgaactttctagagccactgaactgaatacctaacctttgtaagaactcttaatatattaaggattttaactctttgtcatggtgcagatattttccctacactatcatgttttttgatactgcttctactatataaaatctca

SEQ ID NO: 5316 - DNA, 566 bp, Cricetulus griseus; identical to SEQ ID NO: 1674

SEQ ID NO: 5317 - DNA, 577 bp, Cricetulus griseus
aatgtgagaactccggagtggaggaccaacatgcagaagatgcagacgctggggagagcccgcccttaggtgccatcccaataacggactgcttattttgttcccatcactcaagctccctcatgaagaatgtggctcatatgactaaaatccacagcttctttattcctgatattgaatacctctcagatctgaaaggactgattaaatatttgggagagaaagttggtgttggcaagatttgcttgtggtgcaacgagaaagggaaatccttctactccacagaagctgtgcaggcacacatgactgacaaaagccactgtaagctcttcacagatggtgacgctgctttggaatttgcagacttctatgattttaggagtagctacccacattacaaggaggggcaggaccctaatgaaattgatcagttgtcctcggataagactttggaatgcgatgatgaaaccatggagctgatacttccttctggtgccagagtgggtcatcgctccttgatgagatactacaaacaacgatttggcttgccaagagctgtaacagttgctagaaacca

SEQ ID NO: 5318 - DNA, 578 bp, Cricetulus griseus; identical to SEQ ID NO: 1676
  misc_feature (318)..(338): n is a, c, g, or t
  misc_feature (455)..(455): n is a, c, g, or t
  misc_feature (524)..(524): n is a, c, g, or t

SEQ ID NO: 5319 - DNA, 579 bp, Cricetulus griseus; identical to SEQ ID NO: 1677
  misc_feature (184)..(184): n is a, c, g, or t
  misc_feature (188)..(189): n is a, c, g, or t
  misc_feature (204)..(204): n is a, c, g, or t
  misc_feature (216)..(216): n is a, c, g, or t

SEQ ID NO: 5320 - DNA, 522 bp, Cricetulus griseus; identical to SEQ ID NO: 1678

SEQ ID NO: 5321 - DNA, 574 bp, Cricetulus griseus; identical to SEQ ID NO: 1679

SEQ ID NO: 5322 - DNA, 578 bp, Cricetulus griseus; identical to SEQ ID NO: 1680

SEQ ID NO: 5323 - DNA, 578 bp, Cricetulus griseus; identical to SEQ ID NO: 1681

SEQ ID NO: 5324 - DNA, 578 bp, Cricetulus griseus; identical to SEQ ID NO: 1682
  misc_feature (81)..(99): n is a, c, g, or t
  misc_feature (144)..(162): n is a, c, g, or t

SEQ ID NO: 5325 - DNA, 570 bp, Cricetulus griseus
  misc_feature (168)..(184): n is a, c, g, or t
  misc_feature (250)..(295): n is a, c, g, or t
gagaaagtagcagtctcagattcagagagtgtttctttgtcaggttcccccaaatccagccccacctctgccagtgcctgtggtacacaagggctcagacagccagggtccaaatatccagatattgcctcacctacgtttcgaaggttgtttggtgccaaggcaggnnnnnnnnnnnnnnnnncacctaatactgagggtgtgaaatcctcctcagtattgcccagccctagtacctcattagcgcgannnnnnnnnnnnnnnnnnnnnnnnnnnnnnnnnnnnnnnnnnnnnngtgctggtgggctgagcggcaacagcagccctctcttcaataagccctcagacctaactacagatgttataagcttaagtcactccttggcttccagcccagcatcggttcactctttcacatcgggtggtcttgtgtgggctgccaatctgagcagttcctctgccggcagcaaggacactccgagttaccagtccatgactagtctccatacgagctctgagtcaattgacctgcccctcagccatcatggctcgctgtctggactgaccaca

SEQ ID NO: 5326 - DNA, 569 bp, Cricetulus griseus; identical to SEQ ID NO: 1684

SEQ ID NO: 5327 - DNA, 572 bp, Cricetulus griseus; identical to SEQ ID NO: 1685

SEQ ID NO: 5328 - DNA, 464 bp, Cricetulus griseus; identical to SEQ ID NO: 1686
  misc_feature (372)..(394): n is a, c, g, or t
  misc_feature (396)..(424): n is a, c, g, or t

SEQ ID NO: 5329 - DNA, 458 bp, Cricetulus griseus
atgcagttactgttgaagacacaatcggacttaaatactatggaagatgatgaccctcagacttcttacatggtttcagcgtgggctagaatgtgtaaaattcttggaaaagactttcagcagtatcttccactggttatcgagcctcttattaagactgcctcagctaaacctgatgttgctctcttagacacacaagatgtggagaacatgagtgatgatgatggctggcaatttgtaaatcttggagaccagcaaagctttggaattaaaacctcatgacttgaagcaaaagcaactgcttgtcagatgttggtttactatgctaaggagttaagagaaggatttgtggactatacagaacaagttgtgaagctgatggttcctttgttgaaattttattttcacgaccatgttcgagtggcagctgcggaagccatgccctttctcttggaatg

SEQ ID NO: 5330 - DNA, 578 bp, Cricetulus griseus; identical to SEQ ID NO: 1688
  misc_feature (67)..(109): n is a, c, g, or t

SEQ ID NO: 5331 - DNA, 579 bp, Cricetulus griseus; identical to SEQ ID NO: 1689
  misc_feature (79)..(97): n is a, c, g, or t
  misc_feature (409)..(439): n is a, c, g, or t
  misc_feature (552)..(552): n is a, c, g, or t

SEQ ID NO: 5332 - DNA, 579 bp, Cricetulus griseus
  misc_feature (28)..(28): n is a, c, g, or t
  misc_feature (141)..(171): n is a, c, g, or t
  misc_feature (483)..(501): n is a, c, g, or t
agagggactgtccgaaaaaaatccggtncagctgcctttggggggggatatatttcccccaggaaacaattatgcccctggtttcgccgagggcgctattaaccctctgtaaagggaacaaaaggtggggatcccccgggnnnnnnnnnnnnnnnnnnnnnnnnnnnnnnntgggcaaatctttaatggttcatgaaacacattccaccaatgacgtgagaaatcactgacaagcgcatgtacaccagtaaatgcctcccaatcttttccatagacagcactcagtaaatcttggaataggtggctgaatttctgtttctaattcagtagattaaaaacacaagtgtgagtggtataaagatagaagaattatgttatgataaactcaatcacaaaaatagagaatccagaccctttccagctaacttatattacctgtttctcaagttacacacggtggccaaagacaaaatagtaattatnnnnnnnnnnnnnnnnnnnaagtagtgtaaacgctaggattcaaatattagatggtcaatgggcttaaatcaagtgactttagaaacaacatttaac

SEQ ID NO: 5333 - DNA, 579 bp, Cricetulus griseus; identical to SEQ ID NO: 1691
  misc_feature (49)..(63): n is a, c, g, or t

SEQ ID NO: 5334 - DNA, 350 bp, Cricetulus griseus
  misc_feature (110)..(140): n is a, c, g, or t
  misc_feature (142)..(220): n is a, c, g, or t
  misc_feature (237)..(298): n is a, c, g, or t
caggccgccacctgagtgacaactgcatctatcgttccctttacagaaggttatatgatcgctcggagtattcaatgtcataactgacacctgtgagactttgatatacnnnnnnnnnnnnnnnnnnnnnnnnnnnnnnnannnnnnnnnnnnnnnnnnnnnnnnnnnnnnnnnnnnnnnnnnnnnnnnnnnnnnnnnnnnnnnnnnnnnnnnnnnnnnntatatttccacttgtcnnnnnnnnnnnnnnnnnnnnnnnnnnnnnnnnnnnnnnnnnnnnnnnnnnnnnnnnnnnnnnaaaactaattactaagcaaataataggcatttcactcacctaaaagacgaac

SEQ ID NO: 5335 - DNA, 473 bp, Cricetulus griseus; identical to SEQ ID NO: 1693

SEQ ID NO: 5336 - DNA, 579 bp, Cricetulus griseus; identical to SEQ ID NO: 1694
  misc_feature (174)..(196): n is a, c, g, or t

SEQ ID NO: 5337 - DNA, 186 bp, Cricetulus griseus
aggttcaactatgtgtacattagccaactttccacacacatatgtatttaaaaacatgatcctgaatgcttgacagagtcaattgccaatagtagcagttgttaaaattttatattgattgatgtaaactaatcttgaaagatccagccatgatctgttttaaaattaattgtaagagcaaccatt

SEQ ID NO: 5338 - DNA, 579 bp, Cricetulus griseus; identical to SEQ ID NO: 1696

SEQ ID NO: 5339 - DNA, 534 bp, Cricetulus griseus; identical to SEQ ID NO: 1697

SEQ ID NO: 5340 - DNA, 179 bp, Cricetulus griseus; identical to SEQ ID NO: 1698

SEQ ID NO: 5341 - DNA, 582 bp, Cricetulus griseus; identical to SEQ ID NO: 1699
  misc_feature (282)..(329): n is a, c, g, or t

SEQ ID NO: 5342 - DNA, 387 bp, Cricetulus griseus; identical to SEQ ID NO: 1700
  misc_feature (247)..(265): n is a, c, g, or t

SEQ ID NO: 5343 - DNA, 121 bp, Cricetulus griseus
agcctgaagaattaaaatgccaacaccaaaccttacattaacagctctggtccatactactcccatgcatttctaatatattatttgttttataaccacttctaaaattcctgcttcctcc

SEQ ID NO: 5344 - DNA, 558 bp, Cricetulus griseus; identical to SEQ ID NO: 1702
  misc_feature (470)..(470): n is a, c, g, or t

SEQ ID NO: 5345 - DNA, 580 bp, Cricetulus griseus; identical to SEQ ID NO: 1703

SEQ ID NO: 5346 - DNA, 579 bp, Cricetulus griseus; identical to SEQ ID NO: 1704
  misc_feature (458)..(458): n is a, c, g, or t
  misc_feature (536)..(536): n is a, c, g, or t

SEQ ID NO: 5347 - DNA, 579 bp, Cricetulus griseus; identical to SEQ ID NO: 1705

SEQ ID NO: 5348 - DNA, 578 bp, Cricetulus griseus; identical to SEQ ID NO: 1706

SEQ ID NO: 5349 - DNA, 567 bp, Cricetulus griseus; identical to SEQ ID NO: 1707

SEQ ID NO: 5350 - DNA, 579 bp, Cricetulus griseus; identical to SEQ ID NO: 1708

SEQ ID NO: 5351 - DNA, 580 bp, Cricetulus griseus; identical to SEQ ID NO: 1709

SEQ ID NO: 5352 - DNA, 130 bp, Cricetulus griseus
  misc_feature (51)..(79): n is a, c, g, or t
  misc_feature (81)..(94): n is a, c, g, or t
gatgaattaatgtgacaccacacagcgtcttaatcaatactttagctatannnnnnnnnnnnnnnnnnnnnnnnnnnnngnnnnnnnnnnnnnntacattccatattgatccactatctccatcatcaat

SEQ ID NO: 5353 - DNA, 582 bp, Cricetulus griseus; identical to SEQ ID NO: 1711

SEQ ID NO: 5354 - DNA, 524 bp, Cricetulus griseus; identical to SEQ ID NO: 1712

SEQ ID NO: 5355 - DNA, 579 bp, Cricetulus griseus; identical to SEQ ID NO: 1713

SEQ ID NO: 5356 - DNA, 381 bp, Cricetulus griseus; identical to SEQ ID NO: 1714

SEQ ID NO: 5357 - DNA, 511 bp, Cricetulus griseus
ggagccgctgggcatagaggtcgaccagttcctggaagacgtgcggctgcaggagcgcgccaccggtggcttgttggccgaggcccccaatgaaaagctcttcttcgtggacactggatccaagaaaaaagaaccaaacaagaggacctgggtccagaagaagtctcagcgtctccagaaaccccttcgggttgaccttgcccttgagaatccttctaaggtccctgctcccaaagacatcctcgcacaccaggtccccaatgccaagaagctcaggcgaaaggagcagctatgggagaaactggcgaagcagggtgagctgcccagggaggtgcgcaaggcacaggcccggctcctcagccctcctgcaccaaaggccaaacgcgggctacaggacatcattgagcggcccttctatgacctctggaacccaaacaaccctctggacaagccgttggccggtcaggatgcattttttctggagcataccaagaagaaaggagtgaggcgg

SEQ ID NO: 5358 - DNA, 578 bp, Cricetulus griseus; identical to SEQ ID NO: 1716
  misc_feature (84)..(110): n is a, c, g, or t

SEQ ID NO: 5359 - DNA, 496 bp, Cricetulus griseus; identical to SEQ ID NO: 1717
  misc_feature (105)..(119): n is a, c, g, or t

SEQ ID NO: 5360 - DNA, 542 bp, Cricetulus griseus; identical to SEQ ID NO: 1718

SEQ ID NO: 5361 - DNA, 473 bp, Cricetulus griseus; identical to SEQ ID NO: 1719

SEQ ID NO: 5362 - DNA, 524 bp, Cricetulus griseus; identical to SEQ ID NO: 1720
  misc_feature (96)..(127): n is a, c, g, or t

SEQ ID NO: 5363 - DNA, 503 bp, Cricetulus griseus; identical to SEQ ID NO: 1721
  misc_feature (44)..(68): n is a, c, g, or t

SEQ ID NO: 5364 - DNA, 580 bp, Cricetulus griseus; identical to SEQ ID NO: 1722

SEQ ID NO: 5365 - DNA, 561 bp, Cricetulus griseus; identical to SEQ ID NO: 1723

SEQ ID NO: 5366 - DNA, 410 bp, Cricetulus griseus; identical to SEQ ID NO: 1724

SEQ ID NO: 5367 - DNA, 472 bp, Cricetulus griseus
  misc_feature (333)..(353): n is a, c, g, or t
taatggctctcatttgaagactgtggcgttgtctagagccacactgcctagtccgtgtcccctgcagacagcaatgcccagtctgttggacctttaactcatcctcctgggcagagagattgctggctttatggtcccagctgactagggaacagctcatttggggacacactggggcacacaagctcctaagtggtactctgacaaatgctacttggctttagaaaagtgggtttttctatctgactttataatgtcactgaagtgggaaatataatttcttaatttctttttgcaaatacagggtttttctgtttggttgggtttctgtgnnnnnnnnnnnnnnnnnnnnnagacagagtttctctgtgtaacagttctgggtgtcctgggactcactctatagaccaagctggcctcggactcacagaaatctgcctgcctgtctcccaagggttgggattaaaggtgt

SEQ ID NO: 5368 - DNA, 112 bp, Cricetulus griseus; identical to SEQ ID NO: 1726
  misc_feature (40)..(59): n is a, c, g, or t

SEQ ID NO: 5369 - DNA, 137 bp, Cricetulus griseus; identical to SEQ ID NO: 1727

SEQ ID NO: 5370 - DNA, 318 bp, Cricetulus griseus; identical to SEQ ID NO: 1728

SEQ ID NO: 5371 - DNA, 518 bp, Cricetulus griseus
  misc_feature (255)..(370): n is a, c, g, or t
cggcggggaccgaggcacatgaggacccggcgtggaccgcggagatgttgggcgtggcggccggaatgaccaacagcaacatggccaatgccttggccagcgctacatgtgagcgctgcaaggggggctttgcacctgcggagaggatgggtgaacagtaatggtgagctgtaccatgagcagtgcttcgtgtgtgctcagtgcttccagcagttcccagaaggactcttctatgagtttgagggaaggaagtannnnnnnnnnnnnnnnnnnnnnnnnnnnnnnnnnnnnnnnnnnnnnnnnnnnnnnnnnnnnnnnnnnnnnnnnnnnnnnnnnnnnnnnnnnnnnnnnnnnnnnnnnnnnnnnnnnngtgacctctgccaggaagtgctggcagacatagggtttgtcaagaatgccggcagacacctgtgtcgtccttgtcataatcgtgaaaaggccagaggccttggaaaatacatctgccagaaatgccatgccatcattgatgaacaacc

SEQ ID NO: 5372 - DNA, 267 bp, Cricetulus griseus; identical to SEQ ID NO: 1730
  misc_feature (211)..(225): n is a, c, g, or t

SEQ ID NO: 5373 - DNA, 396 bp, Cricetulus griseus
cttacagccatagctgatgaccctaatgggggagtagaggaaattatggaagtttggggctggggtcaccatgaggactacagtgaggagtgtcaccaaggctgagtttttcctgatgaaatgagatggaggggtcaggaatgctggctactttctgatacccatgtatttcctcgggggcaggctagctctgaggagccctgctggcctgtcctctgactctctgtggtaccatcaacagctttaaggagtatactagtcacatgtgtggccttttgaagctctgaacctctttgggagctacagacttgaagctcttacaggcatctgggagcccagctgagcccttcctaccagatagtcccatgccccactccagatccaagttcctcagca

SEQ ID NO: 5374 - DNA, 534 bp, Cricetulus griseus; identical to SEQ ID NO: 1732

SEQ ID NO: 5375 - DNA, 554 bp, Cricetulus griseus; identical to SEQ ID NO: 1733

SEQ ID NO: 5376 - DNA, 580 bp, Cricetulus griseus; identical to SEQ ID NO: 1734

SEQ ID NO: 5377 - DNA, 578 bp, Cricetulus griseus; identical to SEQ ID NO: 1735

SEQ ID NO: 5378 - DNA, 458 bp, Cricetulus griseus; identical to SEQ ID NO: 1736
  misc_feature (207)..(236): n is a, c, g, or t

SEQ ID NO: 5379 - DNA, 579 bp, Cricetulus griseus; identical to SEQ ID NO: 1737
  misc_feature (75)..(103): n is a, c, g, or t

SEQ ID NO: 5380 - DNA, 579 bp, Cricetulus griseus; identical to SEQ ID NO: 1738
  misc_feature (442)..(477): n is a, c, g, or t
  misc_feature (484)..(519): n is a, c, g, or t

SEQ ID NO: 5381 - DNA, 579 bp, Cricetulus griseus; identical to SEQ ID NO: 1739

SEQ ID NO: 5382 - DNA, 569 bp, Cricetulus griseus; identical to SEQ ID NO: 1740

SEQ ID NO: 5383 - DNA, 580 bp, Cricetulus griseus; identical to SEQ ID NO: 1741
  misc_feature (521)..(541): n is a, c, g, or t

SEQ ID NO: 5384 - DNA, 581 bp, Cricetulus griseus; identical to SEQ ID NO: 1742
  misc_feature (396)..(425): n is a, c, g, or t

SEQ ID NO: 5385 - DNA, 581 bp, Cricetulus griseus
  misc_feature (157)..(186): n is a, c, g, or t
aaactggggactggagagatgactcactgtgaagagccctggctgcaggttgggcagtggtggcacatgcatttaattccagcattttgggaggcagaggcatgcagatctctgtgagtttgaggtcagcatagtctacagaacgagttataggacnnnnnnnnnnnnnnnnnnnnnnnnnnnnnntgaaagacaaaaaacaaataaaaacaacagagccctggctgttcctccagatgatgatgagttacgttttaggtcacatggaggcttacagctgcctacaacttcagtcccagaggatccaatgccctcttatggcctccactggcactaggcacacacagatatacatgcaggacacattaaaaacatccatacacattaaaaacaaacattcgggacatcatgttggaatgagaagaaaggaacgcttgtgactggaaatttcaagtttatctccaaggtatcccttatccatttcatttcctttctgttttcagtcattgacactactttggtgccaggctccattatctcttgctttcctgctaaggacccagtcacaccgatctttaccc

SEQ ID NO: 5386 - DNA, 528 bp, Cricetulus griseus; identical to SEQ ID NO: 1744
  misc_feature (477)..(493): n is a, c, g, or t

SEQ ID NO: 5387 - DNA, 540 bp, Cricetulus griseus; identical to SEQ ID NO: 1745

SEQ ID NO: 5388 - DNA, 551 bp, Cricetulus griseus
gcgccccgcggtgcagatcccctccccctcccgttttcctcctccctccctccctcagccttgctctgggacgctggggagggggctgagcccgggtgcagagaactcatctgggtttccgagaatggtaaatacggctggccgtctctggaaaggccactgatctgcctcatgtaaagtatgctcagttcctttccagtggttttgctggaaaccatgtctcactatacagatgaacccagatttaccatagaacagatagatctactccaacgtcttcggcgtactgggatgaccaaacatgaaattctccatgcattagaaactttggaccgtcttgatcaagaacatagtgataagtttggaaggaggtccagctacgggggaagctcatatgggaacagtaccaacaatgttccagcatcttcctctacagccacagcttccacgcagacccagcactccggaatgtccccatcacccagcaacagttatgatacctccccacagccttgcactaccaatcaaaatgggagggagaacaacgatcg

SEQ ID NO: 5389 - DNA, 576 bp, Cricetulus griseus; identical to SEQ ID NO: 1747
  misc_feature (280)..(299): n is a, c, g, or t

SEQ ID NO: 5390 - DNA, 580 bp, Cricetulus griseus; identical to SEQ ID NO: 1748

SEQ ID NO: 5391 - DNA, 578 bp, Cricetulus griseus; identical to SEQ ID NO: 1749

SEQ ID NO: 5392 - DNA, 554 bp, Cricetulus griseus
  misc_feature (56)..(81): n is a, c, g, or t
  misc_feature (405)..(419): n is a, c, g, or t
ccagcctggtctacatagctacttagctagtttcaggacagccagggctacacaannnnnnnnnnnnnnnnnnnnnnnnnnctctttaacagcacagtgcattcacagccacagtgtggggtgactttcaccacactttatacccagaccacttcattgtccccagaaaaagttacatattctctaaaaagtcatttctcatttttcagccccctcaaggcaccaacctgctggcctactgcctcgatcaactgtgcctgatctgggtgcctctatcaacaataatgtgtggccttttgtatctgattcctttcacttggaacagcattaatgaaacttttccatactgtaggaggaatcagtacctctttagtttttatgactgaacataaaacattccactgnnnnnnnnnnnnnnnccatagaaaaaacgctaatgatgatgaggcaggaggatcatgagttcagaccaacctgagatattttaacaaatgcatagacatattctactacaggaatatatccacatttttctccttaacaactgatgaaat

SEQ ID NO: 5393 - DNA, 579 bp, Cricetulus griseus; identical to SEQ ID NO: 1751
  misc_feature (450)..(476): n is a, c, g, or t

SEQ ID NO: 5394 - DNA, 579 bp, Cricetulus griseus; identical to SEQ ID NO: 1752

SEQ ID NO: 5395 - DNA, 569 bp, Cricetulus griseus; identical to SEQ ID NO: 1753

SEQ ID NO: 5396 - DNA, 579 bp, Cricetulus griseus; identical to SEQ ID NO: 1754

SEQ ID NO: 5397 - DNA, 570 bp, Cricetulus griseus; identical to SEQ ID NO: 1755

SEQ ID NO: 5398 - DNA, 578 bp, Cricetulus griseus; identical to SEQ ID NO: 1756

SEQ ID NO: 5399 - DNA, 579 bp, Cricetulus griseus; identical to SEQ ID NO: 1757

SEQ ID NO: 5400 - DNA, 579 bp, Cricetulus griseus; identical to SEQ ID NO: 1758

SEQ ID NO: 5401 - DNA, 77 bp, Cricetulus griseus
ttctacaaactcttctaatcccaacattttcagcaaacgagcttatactattttatattttatttgaagccacactt

SEQ ID NO: 5402 - DNA, 348 bp, Cricetulus griseus
  misc_feature (47)..(82): n is a, c, g, or t
cattctaaccactgcaatatataaggagaaacacagtacttacttannnnnnnnnnnnnnnnnnnnnnnnnnnnnnnnnnnnaattttatccagtaattttatgatgactattggttaaacttttaagacctttttgttgacaatatgttacataactaggaaaattatgcaaaattaatctgaacaaattaaggcttgataatttttaaattttctgtttgcaacatatggttgcaatcattcccagaaagtgctttttcctggcacctactatgcacttggccatctctagatgaagctgaataattccttcctagcctgcagctggcagaaattcatggaagtag

SEQ ID NO: 5403 - DNA, 510 bp, Cricetulus griseus
gcacctgaactcttgccatctgactgtcaccagtttggggaggaaaagaggcctctcctaagaatgtccccagctctggaaatcatgctcccctcacttgtaataatcagctaaggaatcctgaaccaagtgaggaacaaaggctcatgaggccgggactcccttcactgtctttctcaaaattgggttgttaagaacaaaaccaggcaggaccagtggcgcccgtgctcagaagggtcctcccggcagcttgacactgactggttctccgtctccgtgttgatttggggagaaatcaattttgtcttgggattttgtatgttataggaatccttagagaatgtgattccttctgatggggagacagggcaaattattttaatgttttgtattttcacctttataaagatgaaatcctcaggggtgaagaactggttgcataattttctgaatttcaggcactttgtgctgtatgaagacccggatatttaagccttttgggtagtaagg

SEQ ID NO: 5404 - DNA, 567 bp, Cricetulus griseus; identical to SEQ ID NO: 1762

SEQ ID NO: 5405 - DNA, 119 bp, Cricetulus griseus; identical to SEQ ID NO: 1763

SEQ ID NO: 5406 - DNA, 580 bp, Cricetulus griseus; identical to SEQ ID NO: 1764
  misc_feature (276)..(297): n is a, c, g, or t

SEQ ID NO: 5407 - DNA, 460 bp, Cricetulus griseus; identical to SEQ ID NO: 1765

SEQ ID NO: 5408 - DNA, 491 bp, Cricetulus griseus; identical to SEQ ID NO: 1766

SEQ ID NO: 5409 - DNA, 579 bp, Cricetulus griseus; identical to SEQ ID NO: 1767

SEQ ID NO: 5410 - DNA, 546 bp, Cricetulus griseus
  misc_feature (475)..(508): n is a, c, g, or t
cattgaccttcactttgctgtccctctactgtccttgccacagccccgacgctgctgatagcacgtctttcgatgtccagttaggagatatcatcctgacagcgacagacgggcattgctggtccctgtgctcacttcacccacacaccttccagccaacagtgggctcagagaaggttctcttgcggctatcaccagtgggaaatctactcagttccaataggaaagtgaggggagagcagagaacaagctctctcaactccatgcgttaaggaaactctaacctcaaataaacaacctagtacctggtgaagatggagccacatgttggggaaagaagcatgggtgtggtgtggacagaatacagatagaaggtgtttcaactaaaatggtcagggactggactctggggaaagtgggagctgaagggaccagctgggagaaggcaatctgtgggaaggtgacggcatgtgcnnnnnnnnnnnnnnnnnnnnnnnnnnnnnnnnnncccaaactaaaagcaggcaaggtcaggcgttggtgggg

SEQ ID NO: 5411 - DNA, 579 bp, Cricetulus griseus; identical to SEQ ID NO: 1769
  misc_feature (85)..(114): n is a, c, g, or t

SEQ ID NO: 5412 - DNA, 580 bp, Cricetulus griseus; identical to SEQ ID NO: 1770

SEQ ID NO: 5413 - DNA, 579 bp, Cricetulus griseus; identical to SEQ ID NO: 1771

SEQ ID NO: 5414 - DNA, 578 bp, Cricetulus griseus; identical to SEQ ID NO: 1772

SEQ ID NO: 5415 - DNA, 580 bp, Cricetulus griseus; identical to SEQ ID NO: 1773
  misc_feature (75)..(113): n is a, c, g, or t
  misc_feature (216)..(231): n is a, c, g, or t
  misc_feature (548)..(548): n is a, c, g, or t

SEQ ID NO: 5416 - DNA, 435 bp, Cricetulus griseus; identical to SEQ ID NO: 1774

SEQ ID NO: 5417 - DNA, 582 bp, Cricetulus griseus; identical to SEQ ID NO: 1775
  misc_feature (263)..(280): n is a, c, g, or t

SEQ ID NO: 5418 - DNA, 567 bp, Cricetulus griseus; identical to SEQ ID NO: 1776

SEQ ID NO: 5419 - DNA, 579 bp, Cricetulus griseus; identical to SEQ ID NO: 1777

SEQ ID NO: 5420 - DNA, 479 bp, Cricetulus griseus; identical to SEQ ID NO: 1778

SEQ ID NO: 5421 - DNA, 568 bp, Cricetulus griseus
  misc_feature (387)..(404): n is a, c, g, or t
  misc_feature (412)..(412): n is a, c, g, or t
tctatactttaattttaagaacttagagtaatagttcacaacttttaatttgtcttatgttttccattgctgttgtttattgtcatatcctattatttgccttcacctctgtcttaattagcttttcctttgctttgataaaacaccaggactaaaagcaacttggaaaggaaagggtttatttcacgttacagcttataattgatcactgagggaagtcaggacagaaacctggagatagaaactagagcagaagccatggaggaacattgtttactggtggcttggttagtctgctttcttacagcacccaaacccaccagcccaggagtggtactaccacagtgagctgggctcttctacatcagttgtcaatcaagaaaatgnnnnnnnnnnnnnnnnnnttgctcanaatggtttcttcccagatgatgactgagaagctaatttaaaaaaaaatggtgccaagtaccacaagagtaacagaactgtgctgttttctggaattttgttttttacttttttgttgttgtagtagtagttgttgtttgtttggggttttttttgg

SEQ ID NO: 5422 - DNA, 533 bp, Cricetulus griseus
gacccgaccctcagctggcggtcaccatgggcttcacagggttcgggaagaaagcccgaacatttgacttggaggccatgtttgagcaaactcgaaggacagctgtggaaagaagtcggaaaacactagaagcaagagaaaaagaggaagaaatgaacagagagaaagaattaagaaaacaaattgaagatgttgaaccaacaccatcaagctccagtgcaatcagagagcagtcaaaatcatcatccagggacacaagcagcagtgacagtgaagacagttctgattcatctgatgatgagttaattggccctcctttaccccctaaaacggtaggagaaccagttaacactgtggatgaagatatccttggccctttacctgcacccctcggtgaaggagacgaagatgatgatgatgacatagaggatgaaggagaagaagaaaaccccgtccaaagaattcctgactctcatgagataacactgaagcatggcactaaaacagtttctgctttgggtttggatccctca

SEQ ID NO: 5423 - DNA, 578 bp, Cricetulus griseus; identical to SEQ ID NO: 1781

SEQ ID NO: 5424 - DNA, 232 bp, Cricetulus griseus
ttaagacataaatattttcattaataatatataagctgaagtagctagaggtaaaaatgtactgatgtctgaaaccttgagattttccagtaagttgacagactgatggatgtacagatgtttagatatttaaagtaacaataaagagatatagaggaaggtcagttgctcaatctgtggtgatatttatgtgtgagttctctgtaaaaagttaactttggtatttataact

SEQ ID NO: 5425 - DNA, 110 bp, Cricetulus griseus; identical to SEQ ID NO: 1783

SEQ ID NO: 5426 - DNA, 579 bp, Cricetulus griseus; identical to SEQ ID NO: 1784

SEQ ID NO: 5427 - DNA, 500 bp, Cricetulus griseus
agcatagctgtgcctggcacatcaaacccccaacagcgccagctgcccagagcacagtctcagcactcatctcctggggaaatagcagcatctcctcaaggcttagacaacccagccctgctccgagacatgctgctggccaacccgcatgagctgtccttgctgaaggagcgtaacccacccttggcagaagctctgctcagtggagatctcgagagattctctcgggtcctggtagagcagcaacaggaccgagctcgaagagaacaagaaagaattcgtctattttctgctgacccctttgatctggaagctcaggcaaagatagaagaagatataaggcagcagaacatcgaggagaacatgacgatagctatggaggaggccccggagagcttcggccaggtcgccatgctctacatcaactgcagagtgaacgggcaccctgtgaaagccttcgttgactcaggtgcccagatgactattatgagccaggcttg

SEQ ID NO: 5428 - DNA, 579 bp, Cricetulus griseus; identical to SEQ ID NO: 1786
  misc_feature (496)..(496): n is a, c, g, or t

SEQ ID NO: 5429 - DNA, 577 bp, Cricetulus griseus; identical to SEQ ID NO: 1787
  misc_feature (228)..(283): n is a, c, g, or t

SEQ ID NO: 5430 - DNA, 579 bp, Cricetulus griseus; identical to SEQ ID NO: 1788
  misc_feature (441)..(458): n is a, c, g, or t

SEQ ID NO: 5431 - DNA, 122 bp, Cricetulus griseus
  misc_feature (56)..(75): n is a, c, g, or t
tgccggctgctgccctgctggtgccttgcccctgtgagggcactgggccagcccannnnnnnnnnnnnnnnnnnnaagaaccctttcttcaggtttggggcttacccttaaattccaggggc

SEQ ID NO: 5432 - DNA, 306 bp, Cricetulus griseus; identical to SEQ ID NO: 1790

SEQ ID NO: 5433 - DNA, 502 bp, Cricetulus griseus; identical to SEQ ID NO: 1791

SEQ ID NO: 5434 - DNA, 507 bp, Cricetulus griseus; identical to SEQ ID NO: 1792

SEQ ID NO: 5435 - DNA, 580 bp, Cricetulus griseus; identical to SEQ ID NO: 1793
  misc_feature (126)..(140): n is a, c, g, or t

SEQ ID NO: 5436 - DNA, 469 bp, Cricetulus griseus; identical to SEQ ID NO: 1794

SEQ ID NO: 5437 - DNA, 411 bp, Cricetulus griseus; identical to SEQ ID NO: 1795

SEQ ID NO: 5438 - DNA, 562 bp, Cricetulus griseus
ctcatatgctgctgcttgacaacccacacaaagaacccctccggttgcggtataagctgactttcaaccagggtgggcagccattcagcgaagtaggagaagtgaaagactttccagacctctctgtcttgaggactgcctaactcctcaaccgagactcttcagttacacttaggccagcgttcctttcactgtctggtcgggactcattgtgatgtgttgcagagtgccaagagttctcttctgatgtcagaccttgattgccaatctctgtagatcatgtgtgtgtgtgcgtgtgtgttattggggtgctgggggaggagggagagctgggcttgggatttgggtagtgtgggggatgctgacaatttctgagatcatctctgctgcactcatttctgcttctgcatgttggttgacactgttgtccctgcctcgggttggagttttatataagccaaagttttttccatgtattgttatcttttcattcatccactctgtgccttgtcagcctttgaaagtcttagttgctcccaggctgctattctcagggacctta

SEQ ID NO: 5439 - DNA, 556 bp, Cricetulus griseus; identical to SEQ ID NO: 1797

SEQ ID NO: 5440 - DNA, 459 bp, Cricetulus griseus; identical to SEQ ID NO: 1798

SEQ ID NO: 5441 - DNA, 580 bp, Cricetulus griseus; identical to SEQ ID NO: 1799
  misc_feature (61)..(79): n is a, c, g, or t
  misc_feature (156)..(175): n is a, c, g, or t
  misc_feature (521)..(540): n is a, c, g, or t

SEQ ID NO: 5442 - DNA, 533 bp, Cricetulus griseus; identical to SEQ ID NO: 1800
  misc_feature (28)..(80): n is a, c, g, or t

SEQ ID NO: 5443 - DNA, 461 bp, Cricetulus griseus; identical to SEQ ID NO: 1801

SEQ ID NO: 5444 - DNA, 578 bp, Cricetulus griseus; identical to SEQ ID NO: 1802

SEQ ID NO: 5445 - DNA, 508 bp, Cricetulus griseus; identical to SEQ ID NO: 1803

SEQ ID NO: 5446 - DNA, 518 bp, Cricetulus griseus
cgtccggtggttttaacagactcattgggaaacatgggcgacacatgcagccagctgagcttttgttttcaacggttgcaaaggccccagcagaataactgtccaagcagacaggaaggctgtgaggctgagttgagaagcagcaagaggccccaaggcaaggctgccaggcgggcacaccaccacagctctggttcctgccaccagccaaccataggcagggggaggctgtttcctgtgttactctagttgctcattttccctctaagagactggcgtgtctgacagcagccgttactgctcctctgcctctcccatcaaacaggaaaacttgacaatgtagcgctctttctgtaagagtttcccatagtaccacggttcttaaacgtccctcacttgagctccccctggaaagatcaaatggagccacctccagagtcacaaacgcttttgaccagtgcatccagggttcttgagtttcagctttatttcatgtgcaaaacttacagaacttccaa

SEQ ID NO: 5447 - DNA, 296 bp, Cricetulus griseus
atttttaacactttttttaataaaccttttttgggggggggggccccttcccaaatttaaaaatttttgagggcgggaaaaatactcaaaaggttaaaaccccggtttcccaaaaccccaaggtcaatttccaacccctttttggttcccaggggattgggtttccccccaaccttccttttgggcaaaaccccatggcccataaaaacccccctccccttgggccaaatttctaaacatttttgccaaaggccttaaaaaaaatccaacttactttcctttttggaaccctttaa

SEQ ID NO: 5448 - DNA, 530 bp, Cricetulus griseus
gaaccaactttttagttcggacttcatggatgagaatgccctcagcagcctctagtgtggttaaaagtgtacaaaagatgctgacatttttaaagatagaattttctaattcttttagtaaattgtgatagtatgaactgtgttgacttttgaaatttcttccttgtgatggaaatagtttttatttccatggaaagatgaccacatttgacagtttctgcattttttaatcagagtacagaattttatctatgactgctacgtatgtaagtatcaaactggaaatctgctgtactgtatactgatatttaatagactaataaatagctgtcttcagcattggaacaaatttctatacacatatacactgagggaataccatgacaatcaactttaagatcagaaggaagacttaagagtcattgagcatttagaaaatgacaatggaggaaaagttatttaagcatctacagacaagtttttgtcctaacatgggctaccttgggaccggagcacaacaacttgctaaa

SEQ ID NO: 5449 - DNA, 580 bp, Cricetulus griseus; identical to SEQ ID NO: 1807
  misc_feature (66)..(87): n is a, c, g, or t

SEQ ID NO: 5450 - DNA, 258 bp, Cricetulus griseus; identical to SEQ ID NO: 1808

SEQ ID NO: 5451 - DNA, 507 bp, Cricetulus griseus; identical to SEQ ID NO: 1809

SEQ ID NO: 5452 - DNA, 579 bp, Cricetulus griseus; identical to SEQ ID NO: 1810

SEQ ID NO: 5453 - DNA, 506 bp, Cricetulus griseus; identical to SEQ ID NO: 1811

SEQ ID NO: 5454 - DNA, 579 bp, Cricetulus griseus; identical to SEQ ID NO: 1812

SEQ ID NO: 5455 - DNA, 580 bp, Cricetulus griseus; identical to SEQ ID NO: 1813

SEQ ID NO: 5456 - DNA, 492 bp, Cricetulus griseus
attgaagaaaactgaaagcaagtttgagaatggttttaatagatgcacacatctatgttataccacggcaaggggtgtgtttgcctgagagatcctccactggcaccttccactgagtctacgtgaataaatcaaatagatttttgtgtgggacaagatgttgtcctgagtgtgggaaagcattgaagttacatcagcatatcacaaaaagtgggtgagcaggtgaacaaagatggagggggccggagcaagacaagatgtctctgagattgtggaatctgtccctgattgctgatgtggcacacagtcctccttggctccccattttatgtcactgcttgccccaattctggcaccatgcctggtatatacaagatgggaatatgtgttctaatgggatagggaaaaggattttaggtaataagatagtagggcttatggcaaaatcatgtatttagactgaaaaaaaggaaattataagcaaaggctgta

SEQ ID NO: 5457 - DNA, 578 bp, Cricetulus griseus; identical to SEQ ID NO: 1815
  misc_feature (71)..(85): n is a, c, g, or t
  misc_feature (533)..(533): n is a, c, g, or t

SEQ ID NO: 5458 - DNA, 580 bp, Cricetulus griseus; identical to SEQ ID NO: 1816

SEQ ID NO: 5459 - DNA, 566 bp, Cricetulus griseus; identical to SEQ ID NO: 1817
  misc_feature (334)..(354): n is a, c, g, or t

SEQ ID NO: 5460 - DNA, 338 bp, Cricetulus griseus
atttcttggggccagagtggcattatttttacaaggtacatgtgtcatatgtttgtttgcttgatgaaattctgaaaaacagtctaccaattgcagaaaatattacttttctatgtttttattcactggctcagaaagcttctcaaagggtctgtggtcatagtagcatgactgtatccattctgttgacagagatgaagttattcttgtatttgactggtagcaaaaactgggtcataaaaaaaggaaaagatcaattttgtctcactgtttcagtatgtttaaataataatttccatgtttgcataatgaggcccatttctgatagcttggagagc

SEQ ID NO: 5461 - DNA, 248 bp, Cricetulus griseus
taccagatgaagaggtttcactgggagcaggaccagatcgcacacatgaataactacattgccaggtttggccatggcattgccaatctggcctttataaaatcacatcaaagataaaacgctctacacaatgattccaacacaaataaattaaaggattgggtgaaaaaatggtgtttttttctttattttcccaaacccctaacccaaaaatttttataattcttccaaaactaaaccaagccttt

SEQ ID NO: 5462 - DNA, 575 bp, Cricetulus griseus
  misc_feature (459)..(459): n is a, c, g, or t
ctatgtgctggtgaagaagtggagcgaagccctcgtgctgtacgacaggggtctgaaatatgccgacgaggtcagtgctgatggcggagccttcaagaacagcctgaaggacctgcctgatgtgcaagagctcatcactcaagtgaggtcagagaagtgctcgctgcaggccgcagccatcctggatgcaaatgactcccatcaagcagagccctcctctcaagtcaaagacaataagcctctggttgaacggtttgagaccttttgcttggacccttccctcgtcaccaagcaagccagcctcgtgcactttccaccaggcttccagcccatcccttgcaagcctttgttttttgacctggccctcaaccatgtggccttcccaccccttgaggacaagttggagcagaagaccaagagtggcctcacaggatacatcaagggcatctttggattcangagctaaccatgctcttcctcaggggcagggagggcctgacttactctgtattgtgagacagacagcaagttcccaagcattaaatctaagtctgcaatggcaagggcagagctca

SEQ ID NO: 5463 - DNA, 329 bp, Cricetulus griseus; identical to SEQ ID NO: 1821

SEQ ID NO: 5464 - DNA, 383 bp, Cricetulus griseus; identical to SEQ ID NO: 1822

SEQ ID NO: 5465 - DNA, 578 bp, Cricetulus griseus; identical to SEQ ID NO: 1823

SEQ ID NO: 5466 - DNA, 580 bp, Cricetulus griseus; identical to SEQ ID NO: 1824
  misc_feature (64)..(79): n is a, c, g, or t

SEQ ID NO: 5467 - DNA, 511 bp, Cricetulus griseus; identical to SEQ ID NO: 1825

SEQ ID NO: 5468 - DNA, 483 bp, Cricetulus griseus
  misc_feature (225)..(254): n is a, c, g, or t
  misc_feature (410)..(455): n is a, c, g, or t
ttactcactgtatatctgcaaggccagaatgtgaaggcaagccacggaaaagatgctgctgttgagaccaagattgctgagtccttgagattcagagtgggctgtccgctgacttcaaccttggagagcacccctgacaatcctgaggcttcaccgggagctagagccagctaacatttccttgtttaaagactgcctttgatttttcccttgattccatgtatnnnnnnnnnnnnnnnnnnnnnnnnnnnnnngaatcaatgttggcaatacctagttctacttctcaaactggagcatcctcctctatatatttatatgtatgtgttctgtagtcctcctcatgtacctattgtgtattttttttcctaatatttaagcacatgccttttgtgttacacaatatatgnnnnnnnnnnnnnnnnnnnnnnnnnnnnnnnnnnnnnnnnnnnnnnctataatctgtggcaaatagagaaataa

SEQ ID NO: 5469 - DNA, 581 bp, Cricetulus griseus; identical to SEQ ID NO: 1827
  misc_feature (363)..(363): n is a, c, g, or t

SEQ ID NO: 5470 - DNA, 305 bp, Cricetulus griseus; identical to SEQ ID NO: 1828

SEQ ID NO: 5471 - DNA, 545 bp, Cricetulus griseus; identical to SEQ ID NO: 1829

SEQ ID NO: 5472 - DNA, 567 bp, Cricetulus griseus; identical to SEQ ID NO: 1830

SEQ ID NO: 5473 - DNA, 579 bp, Cricetulus griseus; identical to SEQ ID NO: 1831
  misc_feature (379)..(393): n is a, c, g, or t

SEQ ID NO: 5474 - DNA, 578 bp, Cricetulus griseus
  misc_feature (471)..(492): n is a, c, g, or t
  misc_feature (510)..(510): n is a, c, g, or t
aaaggcagtttctgtatggtagtgggaacagcttgctgttaattatggtaatgctgtaggtatcaagtatgtatgactgttaaaggggaaatagaaagcaacattttagagcactacccagtacaatccagagatcaagtggaggtaatggtggcctaaaagggcacttaagagatatggctgctgctcagagctgtgtacatgctactttcttttttttagaaaactcttttattattattattacgactatcattattattactttatgtgtatgagtgttttgcttgcatgtatgtctgtgcaccacgtgtgtgcctaatgcccttggaggtcaaaaagggcattggattccccagaattggaattacggaaagttgtttgtcaccatgtgggtacagacagcagtcttagctgctgagccatctctccagccccacataagatttccaacaggctgttttttgttcnnnnnnnnnnnnnnnnnnnnnntctttctacagagctcangctatcatggaactcactatgtagaccaggctggtctcaaactcaaagatccacctgtctctgcctcc

SEQ ID NO: 5475 - DNA, 600 bp, Cricetulus griseus
  misc_feature (69)..(69): n is a, c, g, or t
  misc_feature (87)..(108): n is a, c, g, or t
  misc_feature (579)..(579): n is a, c, g, or t
ggaggcagagacaggtggatctttgagtttgagaccagcctggtctacatagtgagttccatgatagcntgagctctgtagaaagannnnnnnnnnnnnnnnnnnnnngaacaaaaaacagcctgttggaaatcttatgtggggctggagagatggctcagcagctaagactgctgtctgtacccacatggtgacaaacaactttccgtaattccaattctggggaatccaatgccctttttgacctccaagggcattaggcacacacgtggtgcacagacatacatgcaagcaaaacactcatacacataaagtaataataatgatagtcgtaataataataataaaagagttttctaaaaaaaagaaagtagcatgtacacagctctgagcagcagccatatctcttaagtgcccttttaggccaccattacctccacttgatctctggattgtactgggtagtgctctaaaatgttgctttctatttcccctttaacagtcatacatacttgatacctacagcattaccataattaacagcaagctgttcccactaccatacagaaactgcctttnccccggagcgcgtgggtcgac

SEQ ID NO: 5476 - DNA, 309 bp, Cricetulus griseus
ggtgtctggccaaccaaatccgggagtggaggaggttgggaacatggctcagttaataaagctatggaaaaataaggatctgagtctggatcccagcacccatgacagtgctgagcaagtgtggaaccgatctgtaaccccattcttccagactgtggagggtctctgagataaactgggtagctaaactaaacaaaccggttcagatgagataccacatctctctatgaatgggatggagtaactgaggcagatatgtgatgtcaccctgtggcctctacctatgaatctacacacacactcataaca

SEQ ID NO: 5477 - DNA, 481 bp, Cricetulus griseus; identical to SEQ ID NO: 1835
  misc_feature (55)..(84): n is a, c, g, or t
  misc_feature (437)..(437): n is a, c, g, or t

SEQ ID NO: 5478 - DNA, 261 bp, Cricetulus griseus; identical to SEQ ID NO: 1836

SEQ ID NO: 5479 - DNA, 579 bp, Cricetulus griseus; identical to SEQ ID NO: 1837

SEQ ID NO: 5480 - DNA, 580 bp, Cricetulus griseus; identical to SEQ ID NO: 1838
  misc_feature (372)..(372): n is a, c, g, or t
  misc_feature (466)..(518): n is a, c, g, or t

SEQ ID NO: 5481 - DNA, 600 bp, Cricetulus griseus; identical to SEQ ID NO: 1839
  misc_feature (532)..(532): n is a, c, g, or t

SEQ ID NO: 5482 - DNA, 484 bp, Cricetulus griseus; identical to SEQ ID NO: 1840

SEQ ID NO: 5483 - DNA, 579 bp, Cricetulus griseus; identical to SEQ ID NO: 1841
  misc_feature (267)..(290): n is a, c, g, or t

SEQ ID NO: 5484 - DNA, 579 bp, Cricetulus griseus; identical to SEQ ID NO: 1842
  misc_feature (170)..(193): n is a, c, g, or t

SEQ ID NO: 5485 - DNA, 578 bp, Cricetulus griseus; identical to SEQ ID NO: 1843
  misc_feature (264)..(293): n is a, c, g, or t

SEQ ID NO: 5486 - DNA, 574 bp, Cricetulus griseus
  misc_feature (95)..(118): n is a, c, g, or t
  misc_feature (526)..(526): n is a, c, g, or t
atggctaccttggagggtgagaagcccctacctgtagagatggagaagaacagcaccccctctgagccagactctggccagggacctcctccatnnnnnnnnnnnnnnnnnnnnnnnnccaccaaggaagaggctgaagcccaggggcgtcagagatcatgagagcctgtagccaccaatgtttcaagaggagcccctgccccgttcctgctgctgtctgggtgctactggggaaactggccatggcctgcaaactgggaatccttttcccacccaacccactctcctccttcactcactttctcctttttaagcccacccttggagattggcttggccctcacttccaggtccctgtaccctgtgacctaagtcagggccatgtgccctggtatgaaatggggccattatatctccttagacttgtctcctaagactttgtgttggggtctggactgctgtttccacctctcaacacctctggccttctgcaggcattctaaacctttgggccgggttggggcangagtgcggtgatgaaatataaacttgagtgggtttctgagtggcatct

SEQ ID NO: 5487 - DNA, 494 bp, Cricetulus griseus; identical to SEQ ID NO: 1845
  misc_feature (134)..(150): n is a, c, g, or t
  misc_feature (380)..(442): n is a, c, g, or t

SEQ ID NO: 5488 - DNA, 580 bp, Cricetulus griseus; identical to SEQ ID NO: 1846

SEQ ID NO: 5489 - DNA, 581 bp, Cricetulus griseus; identical to SEQ ID NO: 1847
  misc_feature (210)..(270): n is a, c, g, or t

SEQ ID NO: 5490 - DNA, 579 bp, Cricetulus griseus
  misc_feature (213)..(213): n is a, c, g, or t
agtggttccacctacacaccctcagaggcaggcaatgcattggacttggaactgggagcagaagaggctgatgaagagagtgtaggtgcaggcagtgagggcaaggcagaggagaccagcaccatggaggaagacagggttccagtgatctgtatgtgatgaggaaaagtctcagcttcatccagcctcaaccagtgcctggacctgcctacntaaggagctccagagcctccccagatgctggctatatcctggcactgccaccatcctggcgctgcccaaggctatacctgcctagccctttggtttcagcctgtggatgtctacacacccatgcaggctcttactgcccgtgctgtggctggattaaacagcacagagcttgatagaaaagtgaccgctctgcaccaacaacagtctgccacagacaggacacctggaccacagagtttatttttgtatttcttattgggcctgtacactccagctctaagggccagtgacatgaagccctgttggcggtgcccagtgttttatgggttctggccttggaccagcccctggtgcccacttttgccc

SEQ ID NO: 5491 - DNA, 581 bp, Cricetulus griseus; identical to SEQ ID NO: 1849

SEQ ID NO: 5492 - DNA, 229 bp, Cricetulus griseus; identical to SEQ ID NO: 1850

SEQ ID NO: 5493 - DNA, 580 bp, Cricetulus griseus; identical to SEQ ID NO: 1851
  misc_feature (338)..(362): n is a, c, g, or t

SEQ ID NO: 5494 - DNA, 443 bp, Cricetulus griseus; identical to SEQ ID NO: 1852

SEQ ID NO: 5495 - DNA, 502 bp, Cricetulus griseus; identical to SEQ ID NO: 1853

SEQ ID NO: 5496 - DNA, 581 bp, Cricetulus griseus; identical to SEQ ID NO: 1854

SEQ ID NO: 5497 - DNA, 579 bp, Cricetulus griseus; identical to SEQ ID NO: 1855
  misc_feature (533)..(533): n is a, c, g, or t

SEQ ID NO: 5498 - DNA, 116 bp, Cricetulus griseus; identical to SEQ ID NO: 1856
  misc_feature (41)..(41): n is a, c, g, or t

SEQ ID NO: 5499 - DNA, 579 bp, Cricetulus griseus; identical to SEQ ID NO: 1857
  misc_feature (310)..(351): n is a, c, g, or t
  misc_feature (486)..(486): n is a, c, g, or t
  misc_feature (492)..(537): n is a, c, g, or t
  misc_feature (544)..(544): n is a, c, g, or t

SEQ ID NO: 5500 - DNA, 511 bp, Cricetulus griseus; identical to SEQ ID NO: 1858
  misc_feature (205)..(219): n is a, c, g, or t

SEQ ID NO: 5501 - DNA, 481 bp, Cricetulus griseus; identical to SEQ ID NO: 1859
  misc_feature (410)..(440): n is a, c, g, or t

SEQ ID NO: 5502 - DNA, 579 bp, Cricetulus griseus; identical to SEQ ID NO: 1860
  misc_feature (485)..(485): n is a, c, g, or t

SEQ ID NO: 5503 - DNA, 522 bp, Cricetulus griseus; identical to SEQ ID NO: 1861

SEQ ID NO: 5504 - DNA, 555 bp, Cricetulus griseus; identical to SEQ ID NO: 1862

SEQ ID NO: 5505 - DNA, 581 bp, Cricetulus griseus; identical to SEQ ID NO: 1863

SEQ ID NO: 5506 - DNA, 579 bp, Cricetulus griseus; identical to SEQ ID NO: 1864

SEQ ID NO: 5507 - DNA, 568 bp, Cricetulus griseus; identical to SEQ ID NO: 1865

SEQ ID NO: 5508 - DNA, 600 bp, Cricetulus griseus
  misc_feature (41)..(75): n is a, c, g, or t
  misc_feature (85)..(157): n is a, c, g, or t
  misc_feature (174)..(422): n is a, c, g, or t
  misc_feature (428)..(480): n is a, c, g, or t
  misc_feature (507)..(530): n is a, c, g, or t
acccacgcgggcgggcgtcctcattagagtgacatggtgtnnnnnnnnnnnnnnnnnnnnnnnnnnnnnnnnnnnggatgcccannnnnnnnnnnnnnnnnnnnnnnnnnnnnnnnnnnnnnnnnnnnnnnnnnnnnnnnnnnnnnnnnnnnnnnnngctgtagtgtgggagcnnnnnnnnnnnnnnnnnnnnnnnnnnnnnnnnnnnnnnnnnnnnnnnnnnnnnnnnnnnnnnnnnnnnnnnnnnnnnnnnnnnnnnnnnnnnnnnnnnnnnnnnnnnnnnnnnnnnnnnnnnnnnnnnnnnnnnnnnnnnnnnnnnnnnnnnnnnnnnnnnnnnnnnnnnnnnnnnnnnnnnnnnnnnnnnnnnnnnnnnnnnnnnnnnnnnnnnnnnnnnnnnnnnnnnnnnnnnnnnnnnnnnnnnntgccannnnnnnnnnnnnnnnnnnnnnnnnnnnnnnnnnnnnnnnnnnnnnnnnnnnnaagacctctttcttccaggctttgggnnnnnnnnnnnnnnnnnnnnnnnncaccatcgaaattctaagcgatgtgcagctgataaaaactggagacatagcaggagccagcgaaccccac

SEQ ID NO: 5509 - DNA, 525 bp, Cricetulus griseus; identical to SEQ ID NO: 1867
  misc_feature (49)..(49): n is a, c, g, or t
  misc_feature (89)..(89): n is a, c, g, or t

SEQ ID NO: 5510 - DNA, 578 bp, Cricetulus griseus; identical to SEQ ID NO: 1868
  misc_feature (491)..(509): n is a, c, g, or t

SEQ ID NO: 5511 - DNA, 578 bp, Cricetulus griseus; identical to SEQ ID NO: 1869

SEQ ID NO: 5512 - DNA, 580 bp, Cricetulus griseus; identical to SEQ ID NO: 1870

SEQ ID NO: 5513 - DNA, 579 bp, Cricetulus griseus; identical to SEQ ID NO: 1871
  misc_feature (458)..(473): n is a, c, g, or t

SEQ ID NO: 5514 - DNA, 507 bp, Cricetulus griseus; identical to SEQ ID NO: 1872

SEQ ID NO: 5515 - DNA, 196 bp, Cricetulus griseus; identical to SEQ ID NO: 1873

SEQ ID NO: 5516 - DNA, 510 bp, Cricetulus griseus; identical to SEQ ID NO: 1874
  misc_feature (160)..(178): n is a, c, g, or t

SEQ ID NO: 5517 - DNA, 584 bp, Cricetulus griseus
  misc_feature (35)..(35): n is a, c, g, or t
  misc_feature (42)..(42): n is a, c, g, or t
  misc_feature (47)..(48): n is a, c, g, or t
  misc_feature (57)..(57): n is a, c, g, or t
  misc_feature (80)..(100): n is a, c, g, or t
gtacgggccagtgaatcgcgccgtaatacgaactncactatnagggnncgaattggngtaccgggccccccccttcgagnnnnnnnnnnnnnnnnnnnnntggtccaagaactctggtgtggtcctgagaaagagcaaggtggaaaaatctgcctttgaattttctgagactgaatctatgcttaaaattgcagaaaatactgggagggccctatgtgtgggggcagtacgatctattggttctgcccccatgcttcccttacggcggaatggagaacccttgtcttacatttgtgactcctactctactggcaggtgacaagtcactctccaatgttattgcacatgaaatatcccatatctggacaggaaacctattgactaacaaaacctgggatcacttttggttaaatgaaggacatactgtctatttatagcgtcacatttgtggacgattgtttggggagaagttcaaacatttccatgctttgggaggatggggagagctacagaatacgacaaaaacttttggggagtctcatccctttaccaaactggtggtggatctgaaggatgtagaccca

SEQ ID NO: 5518 - DNA, 581 bp, Cricetulus griseus; identical to SEQ ID NO: 1876

SEQ ID NO: 5519 - DNA, 314 bp, Cricetulus griseus
  misc_feature (133)..(133): n is a, c, g, or t
gacttggggttccggccctttaattccaacattcccttatttcaccctccaactttttcggttggaggctttaaaggttaaaagccagtaaaatgtgacttgaatgggggtgctaagtggcctctcgttcccntccatggaagaaccaatgtgaccccagtcatcccccatccctcccccttctcctttattgctgtaaatatataaatatgtcaggttaaagggaaaggtttccagggctcttttctcccctctgccccaaaacctacctctacccctccccatagccagccagggcagattctctgcctggg

SEQ ID NO: 5520 - DNA, 196 bp, Cricetulus griseus; identical to SEQ ID NO: 1878
  misc_feature (30)..(54): n is a, c, g, or t

SEQ ID NO: 5521 - DNA, 63 bp, Cricetulus griseus
cctctaggtcgacccacgcgtgcggtgtgcgatgacagccctgagctccaagttgatctctga

SEQ ID NO: 5522 - DNA, 579 bp, Cricetulus griseus; identical to SEQ ID NO: 1880

SEQ ID NO: 5523 - DNA, 575 bp, Cricetulus griseus
  misc_feature (509)..(574): n is a, c, g, or t
tttgtaccaaggccatgcaggctaggagtccagagtgggcactgcaggaatggacaagagtgcactgggcttaggtctgccctttctctctggtggtctgcaggccctacaggctgccagtctgcagtgggacttgggagctttctcttcagattccagtgggcctctcagcttgatcccgaaggaagagatgggctctgccctgaaaagtggttatgtcttgaaggctctggatgggtaggccaccagcctgggcactggggcagaaaccatggtgctggagcctggcacagtgcactggataagaccaaatcgccggttctaagtgtgggtgggaggcgtgtcagtgtgtcctgcgatgggtccggtgtcactgtttacatgacctatttgtgtggttatatagccctttatttaaaagagaagttccttttacgaagttattaaattatatgtttaagagctaaaaagaaaaaaaagctgcagagtatttataaaattgtcttaannnnnnnnnnnnnnnnnnnnnnnnnnnnnnnnnnnnnnnnnnnnnnnnnnnnnnnnnnnnnnnnnnt

SEQ ID NO: 5524 - DNA, 415 bp, Cricetulus griseus
  misc_feature (59)..(81): n is a, c, g, or t
  misc_feature (92)..(105): n is a, c, g, or t
  misc_feature (107)..(141): n is a, c, g, or t
  misc_feature (251)..(283): n is a, c, g, or t
  misc_feature (300)..(319): n is a, c, g, or t
caagatccaggataaagagggcatcccccccgaccagcagcgactcatctttgccggcnnnnnnnnnnnnnnnnnnnnnnntctttctgatnnnnnnnnnnnnnnannnnnnnnnnnnnnnnnnnnnnnnnnnnnnnnnnngtggctattaattcttcagtctgcattcccagtgggcaatggatggcattaatctgcactatagccatttgccccaatttaagtttagaaaatccaagtttcagtaatannnnnnnnnnnnnnnnnnnnnnnnnnnnnnnnnttgttgcatggtaagcnnnnnnnnnnnnnnnnnnnncgccccccccgcgggggacccccacctttggtccccttaagggagggtaattggccccctgggggaaaccagggcataagcggttccctgggagaa

SEQ ID NO: 5525 - DNA, 579 bp, Cricetulus griseus; identical to SEQ ID NO: 1883

SEQ ID NO: 5526 - DNA, 567 bp, Cricetulus griseus; identical to SEQ ID NO: 1884

SEQ ID NO: 5527 - DNA, 599 bp, Cricetulus griseus; identical to SEQ ID NO: 1885
  misc_feature (26)..(71): n is a, c, g, or t

SEQ ID NO: 5528 - DNA, 310 bp, Cricetulus griseus
aaagcagtgggctgagacagggcagagctgcccactgctgctggcacctgtcaatctcaatgaatgctactctgctttcctacattctggatgtcaggaacaggtcttgaaggaacttcagaactgcacagaggacatgtcactgcgagacggcctttaaaagtacaaaatctaaagctctaaatgtacggatcaatttctcaattctggacatacacaatgaactactaaaactaatatactctgacgacaatattgacagatatgaaaccatgaccacaggtattaaaaaccatcagaatacaaactg

SEQ ID NO: 5529 - DNA, 314 bp, Cricetulus griseus; identical to SEQ ID NO: 1887

SEQ ID NO: 5530 - DNA, 579 bp, Cricetulus griseus
gaattccaaaatatgactatactaattgcagttataagccaaaaagacttaaaagacatgaaacagactcttggagataacattaccgtgcaaatgtattctccatcctggcctaactttgactatactatggtggttatttttgtaattgctgtgttcactgtggcattaggaggatactggagtggactcattgaattggaaaacatgaagtcagtgacagatgctgacgagaaagagacgaggagaaagaaggacgagtatttgactttcagccctcttacagttgtcgcatttgtggtcatctgctgtgtaatgatcgtcttactctatttcttctacaagtggcttgtttatgttatgatagcaattttctgcatagcgtcagcagtgagtctgtacaactgtcttgctgcattggttgataggatgccatgtggacagtgcacgatttcctgtttcggcaaaaatattaaagtgatcctgattttcctctctggactgtgcatctctgtcgctgttgtgtgggctgtgtttagaaatgaagatagatgggcttggattttacaagatatctta

SEQ ID NO: 5531 - DNA, 581 bp, Cricetulus griseus; identical to SEQ ID NO: 1889

SEQ ID NO: 5532 - DNA, 494 bp, Cricetulus griseus
ttggtgctcagaaccagggaatgcaacacaaagaccatcgagtgctgctcatatttacgaaagcaaacactacttgatagaatcttagcacaatttcctcatctgcttaatttcttccaacaaaacaggggagctaattcaaaatttccttttccctctcaagcacttttgaaatttccagagacctctctgatcagggggtgtttttagagccttttgatgtgtgtttaatctacatggcctgcttttagtgactacagtgacactgagcctctgtggggaggagtgcactttaattctttaatcctcaccttgcgtggccttatgagatactgggtcaggaaacccatttcattcttatctgccaaagagatactcagaagcacatcaaacatcagcacttcatctacacaaaaggatgagactttggtgtcactgaatatactcctttaacagtgactgctatgccatttggaaatgttttttaacctcag

SEQ ID NO: 5533 - DNA, 579 bp, Cricetulus griseus; identical to SEQ ID NO: 1891

SEQ ID NO: 5534 - DNA, 513 bp, Cricetulus griseus; identical to SEQ ID NO: 1892

SEQ ID NO: 5535 - DNA, 494 bp, Cricetulus griseus
atgtccagtcattgttagatgcagcaaatcagtaccagattgaacctgtgaagaaaatgtgtgttgattttttgaaggaacaggtggacgcatcaaattgtcttggtataagtgtgcttgcagagtgtctggactgtcctgaactgaaagcaacagcagatgactttattcaccagcattttaccgaagtttacaaaactgatgaatttctacaacttgatgtcaaacgagtaacccagcttcttatccaggacactctgactgtgagagcagaggaccaggtttatgacgctgcagtgaggtggttaaaatacgatgagcctaatcgccagccatttatggttgatatccttgctaaagtcagatttgctcttatatcgaagaatttcctaagtaaaacagtacaagctgaaccacttattcaagacaatccggaatgccttaaaatggtgataagcggaatgagggaccatctactggctgctgaagatcga

SEQ ID NO: 5536 - DNA, 500 bp, Cricetulus griseus
gtccatccttgggactgaaggaatcctcagtaatccagaaggagctgatagcaattaatgctaacagcacctgaatcacaagctaggagtagcattgttcctgtcaccctatctctagggaggaagaaacagaagatgcggggggcggccggtctgtattctatacaaatgggtgagctcccgattcggtgagcgaccatctcaaaaaacaagatagagaacacttgaggaaggaaccgttatcaccttctgtccttcacacagcgcacgcgcatgcacttaggtttaaatttgtttttacagttgtttgttgtgtgtggggggggtagatatggaggtcagaggacaacttggtcgagtcagttctcttctaccacgtggattgtgaccacaaactcatgttgtcaggctggggaccggagaggaggttactaaagatgggtggctgggtgtgaagagatcaaatttagaatgactggtccccggacttcttagagtgg

SEQ ID NO: 5537 - DNA, 470 bp, Cricetulus griseus
atgggacgactgcgggtcattgcacataatatgcgggcgcaggcgctgtctggcttagcttccccactgggagtgggtggaaatgaccagactatttagtaattggggtccgggggccattcccttctttctcctgagggaagggtggtgttggcatgctggaagataggggctgtgtggagtgaatgctgacaaagggtaaaggaggacttgggagacagagaaagtagtggaaagtctcatttctggaaggagaaaaggaaatcccctaaaagcaaagcagtcagaaaaatcagggggactgttaagggctttgctcagcattccaagcagtgaatgtaagtgactcccttgagcctaagtaaaattactagtacagaaacacagacatggtggggccattgaagggctttttttaactgtttcttgaactctgccattcctgaagtggggggaagaagctcttggat

SEQ ID NO: 5538 - DNA, 507 bp, Cricetulus griseus; identical to SEQ ID NO: 1896

SEQ ID NO: 5539 - DNA, 392 bp, Cricetulus griseus; identical to SEQ ID NO: 1897
  misc_feature (148)..(241): n is a, c, g, or t

SEQ ID NO: 5540 - DNA, 468 bp, Cricetulus griseus; identical to SEQ ID NO: 1898
  misc_feature (42)..(80): n is a, c, g, or t
  misc_feature (240)..(281): n is a, c, g, or t

SEQ ID NO: 5541 - DNA, 567 bp, Cricetulus griseus; identical to SEQ ID NO: 1899
  misc_feature (415)..(432): n is a, c, g, or t
  misc_feature (534)..(534): n is a, c, g, or t

SEQ ID NO: 5542 - DNA, 568 bp, Cricetulus griseus; identical to SEQ ID NO: 1900

SEQ ID NO: 5543 - DNA, 519 bp, Cricetulus griseus
cgcgtgcgctcagggtgaggccatgggctccgtgcccgagttttactccaagaggaggcactacgatgcacagccctccaactcgctggaccaatatggattacgattgggcatgtggtactggaaagatgaaaccaaaactctggaatttagaagtgggacgcctgcagtagagctcaaggataaaggcaagaaagggaaggcggttcacttcgctgaaatggacggtccggcttctgaaaggttgacagataaaaggtttccctcaagggacgaaaagtcactgaaagtcttggagaaacgatatcagctgggcaatatcacgctggatgatgtcaagtttgttgctttgcttttcctccaagacactgaaatgcagcgggtctgttctttcacaacatttatgagagagaaaatatcagatactcaaaaagactggaaattctttgagtccttttatactttctgtacatgcatcgcttggattgtcttccgacgtcagtacctgacagagatcga

SEQ ID NO: 5544 - DNA, 581 bp, Cricetulus griseus; identical to SEQ ID NO: 1902

SEQ ID NO: 5545 - DNA, 579 bp, Cricetulus griseus; identical to SEQ ID NO: 1903

SEQ ID NO: 5546 - DNA, 460 bp, Cricetulus griseus; identical to SEQ ID NO: 1904
  misc_feature (126)..(126): n is a, c, g, or t

SEQ ID NO: 5547 - DNA, 582 bp, Cricetulus griseus; identical to SEQ ID NO: 1905

SEQ ID NO: 5548 - DNA, 583 bp, Cricetulus griseus; identical to SEQ ID NO: 1906
  misc_feature (526)..(551): n is a, c, g, or t

SEQ ID NO: 5549 - DNA, 580 bp, Cricetulus griseus; identical to SEQ ID NO: 1907

SEQ ID NO: 5550 - DNA, 582 bp, Cricetulus griseus; identical to SEQ ID NO: 1908
  misc_feature (231)..(253): n is a, c, g, or t
  misc_feature (301)..(368): n is a, c, g, or t
  misc_feature (370)..(383): n is a, c, g, or t
  misc_feature (392)..(415): n is a, c, g, or t
  misc_feature (500)..(519): n is a, c, g, or t

SEQ ID NO: 5551 - DNA, 581 bp, Cricetulus griseus; identical to SEQ ID NO: 1909

SEQ ID NO: 5552 - DNA, 556 bp, Cricetulus griseus
  misc_feature (155)..(174): n is a, c, g, or t
  misc_feature (436)..(459): n is a, c, g, or t
ttaatttactatttccctaaatgaactgtaatgtcatgtataatacactttctgtatttttcactgtgcttagtgtccaacaaagtgctgactcacataaaaaaaaaaaaacagcagcaacaacccacatacccccagacaaaacctccaggggnnnnnnnnnnnnnnnnnnnnacaacagtcaaaacaatcaccttttgtctccctcctgtttgatgaaaagtctataaatggaatttatcacagcttctccaaatttattttaatatatggggaaaaaaaaagttctataaaataagttccaaaaaaaaatatagggactggggatatggatctttttttaaaatgaaaacttcagtttgatacacagcctaaaaaacagggtgtagggcatggcttaaattatagtgccaagggagtagagacagtcaaaatnnnnnnnnnnnnnnnnnnnnnnnntttgcctaacaattaaatcatgccctctgtgagagactctgtttgactcattctggcaaaacaaggtgaacactgtctgaggaaaacatttaaatta

SEQ ID NO: 5553 - DNA, 347 bp, Cricetulus griseus; identical to SEQ ID NO: 1911

SEQ ID NO: 5554 - DNA, 347 bp, Cricetulus griseus
ctgagcacagtgtacctggccacttttgctgtgtggactattgaatacagggcggagcacaacaattttggagcctgcacatgcattaacaccccagcaagttttgtattttgaaattcagcccatttttaaaaagctaagtacaatagcagctagcagactagttaccaagaaaccccccccccctggcagattttagtgaaactgcccttttgtgaatatgtttggcctaaagtcacattttaggaaaatcatttcgctcgggatccacctatttccctagtcccgccaagggcgcttttaacccttaataaagggcacaaaaggtggccctccccctcggtggc

SEQ ID NO: 5555 - DNA, 566 bp, Cricetulus griseus; identical to SEQ ID NO: 1913

SEQ ID NO: 5556 - DNA, 581 bp, Cricetulus griseus; identical to SEQ ID NO: 1914
  misc_feature (284)..(320): n is a, c, g, or t

SEQ ID NO: 5557 - DNA, 521 bp, Cricetulus griseus
  misc_feature (46)..(46): n is a, c, g, or t
  misc_feature (77)..(91): n is a, c, g, or t
cccccccttcgaggggtcgacccacggcgtgggcgggcaggaatgnagcaatcgctcattgtattcctcgatgaatnnnnnnnnnnnnnnngtctcgggtgcccactgactacagatctcagccccacgagtgttcgataccattttcattatgaagcgtatcagtctggtcaaagcagaattcatttcaaactgggaggcgggggtcattttcttgcgctggtgacacacgagttccattctggctacagtcttcagaggacatggaaaaatgctcaaaagacctggcacactgacacacctatctgctggaaatgagccatctcttacaaagcatggacgtcctacaccggacatactcagcgacatccatcaatgccatccagggtggagcttttgaaagtccgaatgaggaaaatcgactacacatgaggtggcggttcatatctattgccaaacattctaaaggaaccctgcaggtccctaaaccttttgctgacccagagagactacactcttct

SEQ ID NO: 5558 - DNA, 90 bp, Cricetulus griseus
tctagtcgacccacgcgtggggcgccgcgtccgatggcccataagttttggagtttaattgccgttttggtgatccagaatgccaagtga

SEQ ID NO: 5559 - DNA, 580 bp, Cricetulus griseus; identical to SEQ ID NO: 1917

SEQ ID NO: 5560 - DNA, 582 bp, Cricetulus griseus; identical to SEQ ID NO: 1918

SEQ ID NO: 5561 - DNA, 493 bp, Cricetulus griseus; identical to SEQ ID NO: 1919

SEQ ID NO: 5562 - DNA, 566 bp, Cricetulus griseus; identical to SEQ ID NO: 1920
  misc_feature (38)..(101): n is a, c, g, or t

SEQ ID NO: 5563 - DNA, 410 bp, Cricetulus griseus
cagcaccatgcccgcactcttggagcgccccaagctttccaacgctatggccagggctctgcacaggcacatgatgatggagcgggagcgcttacggcaggaggaggaagaggtggacaagatgatggaacaaaagatgaaagaagagcacgagagaagaaagaaaaaggagatggaagagaggatgtcactagaagagaccaaggaacaaattctgaaactacaggagaaactttcagctctacaggaggagaagcaccagcttttcttgcagctcaaaaaagttctgcatgaagaagagaaacggagacgaaaggaacagagtgacctaaccactctgacatcagctgcctaccagcagagcctgactgttcacacgggaactcacctcctcagcatgcagggggagt

SEQ ID NO: 5564 - DNA, 580 bp, Cricetulus griseus; identical to SEQ ID NO: 1922

SEQ ID NO: 5565 - DNA, 378 bp, Cricetulus griseus; identical to SEQ ID NO: 1923

SEQ ID NO: 5566 - DNA, 581 bp, Cricetulus griseus; identical to SEQ ID NO: 1924

SEQ ID NO: 5567 - DNA, 541 bp, Cricetulus griseus
  misc_feature (156)..(182): n is a, c, g, or t
  misc_feature (252)..(272): n is a, c, g, or t
  misc_feature (303)..(321): n is a, c, g, or t
  misc_feature (412)..(429): n is a, c, g, or t
ttccaatttgaagaatgttctagtttaaaagaatgcatctatttaatctttcccttgatgacttagggaggaagttgaaaagttgtggctttgaaataaaagcatcttatctgggtgtggtggtatgtatcttttttgtttgttttttttcgagtnnnnnnnnnnnnnnnnnnnnnnnnnnngtcccggaacttgctctgtagactaggctggcctagaactcacagagatatgcttacctctgcctccccnnnnnnnnnnnnnnnnnnnnnggccaccagtgcccagagggtggcatgtatnnnnnnnnnnnnnnnnnnncaggcagatatttttgagtttgaggacagctagaactatacagagagaccctgtctcaaaacaaaacaaaaaccacacacacaaaaaaacnnnnnnnnnnnnnnnnnnaaagtacggaaaaaacccaaacaatttatactgcagttcaatggtagagaagctgcttaccattcacatggccctagattccattcctgccctgcgagtataaataaggccc

SEQ ID NO: 5568 - DNA, 579 bp, Cricetulus griseus; identical to SEQ ID NO: 1926
  misc_feature (334)..(334): n is a, c, g, or t

SEQ ID NO: 5569 - DNA, 175 bp, Cricetulus griseus; identical to SEQ ID NO: 1927

SEQ ID NO: 5570 - DNA, 581 bp, Cricetulus griseus; identical to SEQ ID NO: 1928
  misc_feature (302)..(324): n is a, c, g, or t
  misc_feature (411)..(433): n is a, c, g, or t

SEQ ID NO: 5571 - DNA, 85 bp, Cricetulus griseus
gcgtgcgttttcaacacaggattttgtagccggatatctgtctgggcacctattacaaggcccatgccttttgggtgtggattca

SEQ ID NO: 5572 - DNA, 288 bp, Cricetulus griseus; identical to SEQ ID NO: 1930
  misc_feature (254)..(254): n is a, c, g, or t

SEQ ID NO: 5573 - DNA, 580 bp, Cricetulus griseus; identical to SEQ ID NO: 1931
  misc_feature (509)..(540): n is a, c, g, or t

SEQ ID NO: 5574 - DNA, 538 bp, Cricetulus griseus
tttatttccccatttaaatgtgcccgtggttttatcagcctggtaacttaagagtccagatgtctaggataaaatggctgtcattctataaactgttcaccattctttaaggcttatatttacctcaggaaacttattctagtatggggggaccaattgaaatctcaagtgataaatacttctttacacctacacactggtacctaattctgtcttagttcagtgagccataggtcaggcagctagatggttagtgagccataagtcgggcggctagatggctgaaagctcattggagtaaaacaaggagtgcctgccagcactgaatcagggacaagtggctattccaaccagagtggcatctgtcatcagtaagatgaagggattgcctttggcagtgacagtgtcctattccaagtctggaatggcatttttctcacactgcagcccatgaagctaagtccctcagcatttttagagaacttttgaaaatgaatttagttgcataatcaagctgagcaatttccactgtgggctt

SEQ ID NO: 5575 - DNA, 581 bp, Cricetulus griseus; identical to SEQ ID NO: 1933

SEQ ID NO: 5576 - DNA, 580 bp, Cricetulus griseus; identical to SEQ ID NO: 1934

SEQ ID NO: 5577 - DNA, 579 bp, Cricetulus griseus; identical to SEQ ID NO: 1935
  misc_feature (184)..(201): n is a, c, g, or t

SEQ ID NO: 5578 - DNA, 566 bp, Cricetulus griseus; identical to SEQ ID NO: 1936

SEQ ID NO: 5579 - DNA, 223 bp, Cricetulus griseus; identical to SEQ ID NO: 1937

SEQ ID NO: 5580 - DNA, 156 bp, Cricetulus griseus
cacccacgcgggggggactgatgagtttgctaaaggaagaaaagtggcagatctctatgaacttgtacagtatgctggaaacattattccaaggctttatctgttgatcacagttggagttgtatatgtcaagtcatttcctcaatccaggaaaga

SEQ ID NO: 5581 - DNA, 572 bp, Cricetulus griseus; identical to SEQ ID NO: 1939

SEQ ID NO: 5582 - DNA, 581 bp, Cricetulus griseus; identical to SEQ ID NO: 1940

SEQ ID NO: 5583 - DNA, 202 bp, Cricetulus griseus; identical to SEQ ID NO: 1941

SEQ ID NO: 5584 - DNA, 581 bp, Cricetulus griseus; identical to SEQ ID NO: 1942
  misc_feature (450)..(450): n is a, c, g, or t
  misc_feature (545)..(545): n is a, c, g, or t

SEQ ID NO: 5585 - DNA, 582 bp, Cricetulus griseus; identical to SEQ ID NO: 1943

SEQ ID NO: 5586 - DNA, 569 bp, Cricetulus griseus; identical to SEQ ID NO: 1944
  misc_feature (543)..(543): n is a, c, g, or t

SEQ ID NO: 5587 - DNA, 566 bp, Cricetulus griseus
tttttacctttggttgtactactataatgaactttagttgtaccttttaatgaaccgtggaagagttggtttcctttttaaggctgttgcacacttctagtgtacattctcaagcctccccatctcctcttgccccaaaagacagctgaccaccagtgccaaggtatgttgcagacttgacaactcacttgacagctgtggttgtcatcaagtcgtgagaggaaaacatagacagaggtaggctatgttccccattctcttgggagcaatgctagcttttcaatttctatttttaaaaatttagattatatttacttattttatgtggtatggtgggatggcacacaggtacaattaagagaataaattttggaagttggttctcaatttctaccgtgtctgacctgggctcagcctcaggccatgcagctttacccactgagccgtctccccagcccctttccattgttgttataagttgaatctgttttgtagctagcagcagtcctcctgcttcagcctctctaatagtgggaatgaactgccatgcccagcttgtttgggtt

SEQ ID NO: 5588 - DNA, 600 bp, Cricetulus griseus; identical to SEQ ID NO: 1946

SEQ ID NO: 5589 - DNA, 582 bp, Cricetulus griseus; identical to SEQ ID NO: 1947
  misc_feature (298)..(326): n is a, c, g, or t
  misc_feature (532)..(553): n is a, c, g, or t

SEQ ID NO: 5590 - DNA, 578 bp, Cricetulus griseus; identical to SEQ ID NO: 1948
  misc_feature (518)..(518): n is a, c, g, or t

SEQ ID NO: 5591 - DNA, 245 bp, Cricetulus griseus; identical to SEQ ID NO: 1949
  misc_feature (70)..(94): n is a, c, g, or t

SEQ ID NO: 5592 - DNA, 473 bp, Cricetulus griseus
  misc_feature (283)..(309): n is a, c, g, or t
acatgaagatccgattacaaagaccagtcgtgttttacgaatagaagccaaaagcaaggatggaaaattagtgccaatgacaatttttcacaaaatggattctgaggacttggagaagaagcccctcttggtgcatgtgtatggagcttatgggatggatttgaaaatgaatttccggcctgagaggcgagtcttggtagatgatggatggatcttaacatattgccatgttaagggtggtggcgagttgggcctccagtggcatgctgatggctgcctaacnnnnnnnnnnnnnnnnnnnnnnnnnnnaaaggcttgcattaagacgcttgatagccaaggcttgtgccagccgagcctaaccacactgagcgctttcaatgctggaggggtgcttgtgggagccctgtgcaacttcaaaccatagctccttcgaactgagactctggaggcacctttgttgcatgtcctca

SEQ ID NO: 5593 - DNA, 579 bp, Cricetulus griseus; identical to SEQ ID NO: 1951

SEQ ID NO: 5594 - DNA, 579 bp, Cricetulus griseus; identical to SEQ ID NO: 1952

SEQ ID NO: 5595 - DNA, 581 bp, Cricetulus griseus; identical to SEQ ID NO: 1953
  misc_feature (457)..(482): n is a, c, g, or t

SEQ ID NO: 5596 - DNA, 567 bp, Cricetulus griseus; identical to SEQ ID NO: 1954

SEQ ID NO: 5597 - DNA, 579 bp, Cricetulus griseus; identical to SEQ ID NO: 1955
  misc_feature (465)..(483): n is a, c, g, or t

SEQ ID NO: 5598 - DNA, 567 bp, Cricetulus griseus; identical to SEQ ID NO: 1956
  misc_feature (338)..(357): n is a, c, g, or t
  misc_feature (516)..(516): n is a, c, g, or t

SEQ ID NO: 5599 - DNA, 476 bp, Cricetulus griseus; identical to SEQ ID NO: 1957

SEQ ID NO: 5600 - DNA, 580 bp, Cricetulus griseus; identical to SEQ ID NO: 1958

SEQ ID NO: 5601 - DNA, 580 bp, Cricetulus griseus; identical to SEQ ID NO: 1959

SEQ ID NO: 5602 - DNA, 128 bp, Cricetulus griseus; identical to SEQ ID NO: 1960

SEQ ID NO: 5603 - DNA, 432 bp, Cricetulus griseus; identical to SEQ ID NO: 1961
  misc_feature (373)..(400): n is a, c, g, or t

SEQ ID NO: 5604 - DNA, 579 bp, Cricetulus griseus; identical to SEQ ID NO: 1962

SEQ ID NO: 5605 - DNA, 134 bp, Cricetulus griseus; identical to SEQ ID NO: 1963

SEQ ID NO: 5606 - DNA, 579 bp, Cricetulus griseus; identical to SEQ ID NO: 1964

SEQ ID NO: 5607 - DNA, 153 bp, Cricetulus griseus
gtggactctgcctgggctggtctttaccaagttacagtgaatctagtagacattttacctgtctccaaatctatcttgggtacagcccctggatattttatctgggtttggagagttttaaagggtgtgcgcgcacgtgtgtgtgtggggggg

SEQ ID NO: 5608 - DNA, 541 bp, Cricetulus griseus
caacccagtgcttctcaaagtgaagaaaaagctcctgagctgcccaaaccaaagaagaacagatgttttatgtgtagaaagaaagttggccttacagggtttgactgccgatgtggaaatttgttttgtggacttcaccgttactctgacaagcacaactgtccatatgattacaaagcagaagctgcagcaaaaatcagaaaagagaatccagttgttgtggctgaaaagatccagagaatataaaattactacatgtgaagagactgaaactttgtttttattttaatatatcgtaggaaaacattaaagagcagatgcatggccattttcctttgatgttctccagagttttgctttatatttgtctgtcgtataattgatattttaggatgtttgggtgtttgttacaggcagaattggatagatacagccctacaaatgtatatgccctccccctcataaaattggacaaaaatctgcgcaacaaattgaaataacacagataataggaacaaaatttagttccacgtgccaaatt

SEQ ID NO: 5609 - DNA, 580 bp, Cricetulus griseus; identical to SEQ ID NO: 1967

SEQ ID NO: 5610 - DNA, 385 bp, Cricetulus griseus; identical to SEQ ID NO: 1968

SEQ ID NO: 5611 - DNA, 580 bp, Cricetulus griseus; identical to SEQ ID NO: 1969

SEQ ID NO: 5612 - DNA, 557 bp, Cricetulus griseus; identical to SEQ ID NO: 1970
  misc_feature (494)..(494): n is a, c, g, or t
  misc_feature (516)..(516): n is a, c, g, or t

SEQ ID NO: 5613 - DNA, 578 bp, Cricetulus griseus; identical to SEQ ID NO: 1971

SEQ ID NO: 5614 - DNA, 146 bp, Cricetulus griseus; identical to SEQ ID NO: 1972

SEQ ID NO: 5615 - DNA, 417 bp, Cricetulus griseus; identical to SEQ ID NO: 1973

SEQ ID NO: 5616 - DNA, 234 bp, Cricetulus griseus; identical to SEQ ID NO: 1974

SEQ ID NO: 5617 - DNA, 493 bp, Cricetulus griseus
  misc_feature (128)..(144): n is a, c, g, or t
tagtgccacagccaagactcaacataatggcatgaacaacatcattcgactgttcctgaagaagggactagtcaatgacctggccagagttcctcacagcctagacttgtcgagtcctaatatggccnnnnnnnnnnnnnnnnntctaaaacctttggaaacactttcccggattgtaaaccagcccagtagcctttttggcagcaagagtgcttctagcaagagcaagtctgagcaggatgcccaaggagcctctcaagattcaaatagccatcagcaagatccaggcgagcctggggaagcagaagtacaggaggaggatcatgatgtctctcagacagaggttgcagatggggatatcatggatggggaggctgaaaccgactcagtggtgattgctgggcaacctgaggtgctcagttcacaagagatgcaggtagggaggcagatcattccagcaatcttcagttgcaacgctgaaccaaaaccccca

SEQ ID NO: 5618 - DNA, 357 bp, Cricetulus griseus; identical to SEQ ID NO: 1976
  misc_feature (200)..(248): n is a, c, g, or t

SEQ ID NO: 5619 - DNA, 417 bp, Cricetulus griseus; identical to SEQ ID NO: 1977
  misc_feature (333)..(352): n is a, c, g, or t

SEQ ID NO: 5620 - DNA, 255 bp, Cricetulus griseus; identical to SEQ ID NO: 1978

SEQ ID NO: 5621 - DNA, 361 bp, Cricetulus griseus; identical to SEQ ID NO: 1979
  misc_feature (245)..(294): n is a, c, g, or t

SEQ ID NO: 5622 - DNA, 581 bp, Cricetulus griseus; identical to SEQ ID NO: 1980
  misc_feature (70)..(107): n is a, c, g, or t

SEQ ID NO: 5623 - DNA, 380 bp, Cricetulus griseus; identical to SEQ ID NO: 1981

SEQ ID NO: 5624 - DNA, 203 bp, Cricetulus griseus; identical to SEQ ID NO: 1982

SEQ ID NO: 5625 - DNA, 246 bp, Cricetulus griseus; identical to SEQ ID NO: 1983
  misc_feature (60)..(136): n is a, c, g, or t
  misc_feature (140)..(166): n is a, c, g, or t
  misc_feature (182)..(221): n is a, c, g, or t

SEQ ID NO: 5626 - DNA, 576 bp, Cricetulus griseus; identical to SEQ ID NO: 1984

SEQ ID NO: 5627 - DNA, 577 bp, Cricetulus griseus; identical to SEQ ID NO: 1985

SEQ ID NO: 5628 - DNA, 518 bp, Cricetulus griseus
aaatgagtttaaggaatggcagtacttcaagagcctgcacaggttcactcacatcccttcaggaaagtgcttagatcgatcagatgtccttcatcaagtcttcatctccaactgtgactccaataaaatgactcagaagtgggaaatgaataacattcacagtgtttaagaagagtgcacaaaaccaataatctacctactgacaagtacacttacagaggactgaaaatcgcctggaacctgctgcaaccgttattactaattctgtacagctccaatcctggaacctctgatcagattgaaggacattgataaactgtgatttttacaataacattatcatctgcagttactgtttacaaaactgcttttaccttaaactctgtagatgtttacatcctttttcttttgtttttagatgacgttggtaatttgtgcctttaactccgttcagaacagagttaaagcatatgttgtcttctttgggaatacactcaggggtctgaaaggcagtttgg

SEQ ID NO: 5629 - DNA, 561 bp, Cricetulus griseus; identical to SEQ ID NO: 1987
  misc_feature (62)..(76): n is a, c, g, or t
  misc_feature (254)..(254): n is a, c, g, or t

SEQ ID NO: 5630 - DNA, 195 bp, Cricetulus griseus; identical to SEQ ID NO: 1988
  misc_feature (67)..(117): n is a, c, g, or t

SEQ ID NO: 5631 - DNA, 578 bp, Cricetulus griseus; identical to SEQ ID NO: 1989
  misc_feature (370)..(429): n is a, c, g, or t

SEQ ID NO: 5632 - DNA, 579 bp, Cricetulus griseus; identical to SEQ ID NO: 1990

SEQ ID NO: 5633 - DNA, 202 bp, Cricetulus griseus; identical to SEQ ID NO: 1991

SEQ ID NO: 5634 - DNA, 338 bp, Cricetulus griseus; identical to SEQ ID NO: 1992

SEQ ID NO: 5635 - DNA, 115 bp, Cricetulus griseus; identical to SEQ ID NO: 1993

SEQ ID NO: 5636 - DNA, 579 bp, Cricetulus griseus; identical to SEQ ID NO: 1994

SEQ ID NO: 5637 - DNA, 305 bp, Cricetulus griseus; identical to SEQ ID NO: 1995
  misc_feature (219)..(254): n is a, c, g, or t

SEQ ID NO: 5638 - DNA, 506 bp, Cricetulus griseus; identical to SEQ ID NO: 1996
  misc_feature (407)..(407): n is a, c, g, or t

SEQ ID NO: 5639 - DNA, 567 bp, Cricetulus griseus; identical to SEQ ID NO: 1997
  misc_feature (416)..(416): n is a, c, g, or t

SEQ ID NO: 5640 - DNA, 448 bp, Cricetulus griseus; identical to SEQ ID NO: 1998

SEQ ID NO: 5641 - DNA, 576 bp, Cricetulus griseus; identical to SEQ ID NO: 1999
  misc_feature (123)..(123): n is a, c, g, or t
  misc_feature (134)..(134): n is a, c, g, or t
  misc_feature (465)..(465): n is a, c, g, or t

SEQ ID NO: 5642 - DNA, 422 bp, Cricetulus griseus; identical to SEQ ID NO: 2000
  misc_feature (221)..(242): n is a, c, g, or t

SEQ ID NO: 5643 - DNA, 594 bp, Cricetulus griseus; identical to SEQ ID NO: 2001
  misc_feature (470)..(502): n is a, c, g, or t

SEQ ID NO: 5644 - DNA, 415 bp, Cricetulus griseus; identical to SEQ ID NO: 2002

SEQ ID NO: 5645 - DNA, 501 bp, Cricetulus griseus; identical to SEQ ID NO: 2003
  misc_feature (295)..(317): n is a, c, g, or t
  misc_feature (320)..(332): n is a, c, g, or t
  misc_feature (376)..(406): n is a, c, g, or t

SEQ ID NO: 5646 - DNA, 582 bp, Cricetulus griseus; identical to SEQ ID NO: 2004
  misc_feature (119)..(136): n is a, c, g, or t

SEQ ID NO: 5647 - DNA, 354 bp, Cricetulus griseus; identical to SEQ ID NO: 2005

SEQ ID NO: 5648 - DNA, 582 bp, Cricetulus griseus; identical to SEQ ID NO: 2006
  misc_feature (89)..(89): n is a, c, g, or t
  misc_feature (310)..(327): n is a, c, g, or t
  misc_feature (477)..(477): n is a, c, g, or t

SEQ ID NO: 5649 - DNA, 581 bp, Cricetulus griseus
aaggaatggttcatggacactgcatgtgcaggcataacaccaaaggcataaactgtgagctgtgcatggatatctaccatgatttcccatggagacctgctgaaggtcggaacagcaatgcttgcaaaaaatgcaactgcaatgaacattccagctcatgtcactttgacatggcagttttcttggccactgggaatgtcagcgggggcgtgtgtgatgactgtcagcacaacaccatgggacgcaactgcgagcagtgcaaaccattctactaccagcaccccgagagggacgtccgagaccccaatctctgtgaaccatgtacctgtgacccagctggttctgagaatggaggaatctgtgacggttacactgatttctctgcgggtctcattgctggtcagtgccggtgcaaattgcatgttgaaggacagcgctgcgatgtctgtaaagaaggcttctatggtttaagtgctgaagacccatttggttgtaaatcatgtgcttgcaatcctctgggaacaattcctggtgggaatccttgtgattctgagactgggtactgccactgtaagcaactt

SEQ ID NO: 5650 - DNA, 341 bp, Cricetulus griseus; identical to SEQ ID NO: 2008

SEQ ID NO: 5651 - DNA, 506 bp, Cricetulus griseus; identical to SEQ ID NO: 2009

SEQ ID NO: 5652 - DNA, 293 bp, Cricetulus griseus
  misc_feature (110)..(110): n is a, c, g, or t
  misc_feature (220)..(220): n is a, c, g, or t
aaatggccaatttaagccgctgcaacctcgcacatgcaaatctctgctgtgctaatcttgaacgagctgatctttctggatcagtgctcgactgcgcaaatctccagggnagtcaagatgctctgctcaaacgcagaaggcgcatccctgaggctctgtaattttgaggatccttccggtcttaaagccaacttacagggtgctaatctgaaaggcgtanatatggaaggaagtcagatgacaggaattaaccttcgagttgccaccttaaaaaatgcaaaactgaagaactg

SEQ ID NO: 5653 - DNA, 126 bp, Cricetulus griseus
  misc_feature (55)..(55): n is a, c, g, or t
  misc_feature (71)..(71): n is a, c, g, or t
  misc_feature (92)..(92): n is a, c, g, or t
  misc_feature (99)..(99): n is a, c, g, or t
tcttcaaggtaagtagatgggcatcggtggcgtcctcggcctcctctggttccanagacggttacctaagnattcctgccaggcacattganatgtgtntgatggtgacagctgatcacgggccat

SEQ ID NO: 5654 - DNA, 350 bp, Cricetulus griseus
  misc_feature (71)..(71): n is a, c, g, or t
  misc_feature (80)..(80): n is a, c, g, or t
  misc_feature (83)..(83): n is a, c, g, or t
  misc_feature (107)..(107): n is a, c, g, or t
  misc_feature (121)..(121): n is a, c, g, or t
  misc_feature (143)..(143): n is a, c, g, or t
  misc_feature (164)..(164): n is a, c, g, or t
  misc_feature (203)..(203): n is a, c, g, or t
  misc_feature (218)..(218): n is a, c, g, or t
  misc_feature (233)..(233): n is a, c, g, or t
  misc_feature (245)..(245): n is a, c, g, or t
  misc_feature (247)..(247): n is a, c, g, or t
  misc_feature (296)..(296): n is a, c, g, or t
  misc_feature (307)..(307): n is a, c, g, or t
ttccctaggacctgagctgggtcctcaacacccacattaggcagctgtaaccccacctgtacctccagctntcagggatntancacccttttttaccctccaccaantactcacacccacncatacaaataagtaatattatntttttaaaaaaaataatctantttaaccctttgactttatagctcaggaaaaactgaaanaacggggactatacnctgatacagtcaaanatggggcccggntntttgccagccaggcaaagcgtttgccatgcaaacctaagtacctgatgngatccccagtncccacaaaaaagctgagcacatagccggacagacacctgcacg

SEQ ID NO: 5655 - DNA, 163 bp, Cricetulus griseus
  misc_feature (88)..(88): n is a, c, g, or t
  misc_feature (98)..(98): n is a, c, g, or t
  misc_feature (138)..(138): n is a, c, g, or t
aaaaagccagctctgagggtggtgcatccacgggtgctggcctggactcgctgcacaagaacagcgtcagtcaaatctcggtgctcancgggggcaangccaagtgctcgcagttctgcactacaggcatggtatggnggcatgagcatctgggatgtgaaga

SEQ ID NO: 5656 - DNA, 394 bp, Cricetulus griseus; identical to SEQ ID NO: 2014
  misc_feature (193)..(193): n is a, c, g, or t
  misc_feature (361)..(361): n is a, c, g, or t

SEQ ID NO: 5657 - DNA, 549 bp, Cricetulus griseus
  misc_feature (455)..(455): n is a, c, g, or t
  misc_feature (465)..(465): n is a, c, g, or t
tgtgtttttaaaaggcaagtatgaatctttttaaaggctaaccaccgtgggcatagtttcctctaacattaaactgcagactccccccaaacccttatctagtagatacctgaaatgtgcttccccatgtttgaaacttcagattgcttacaaattaaagtttaatgtataactatggtactctaggttaactaaaataaaacagaacagtcaatactataataaaagttatatgaatctcaacatctaattatgctgtatttacccttctcatgagatgacccaacgtctataggagatgaagtgagcaaggtgttatgtcatatcactggtgattacgcaagggtcacctgcacacagcatggcagtacctggatgtccctatgataattaagatggctagtgagtggctgtcgagagggcagcatgtgcagtgtggatagctcatgtctcangaaagacaangtttcatgacattgctgagattgtctgcattttacagttagtcttttcacttgactttttataactgaagtcactgaaaaggga

SEQ ID NO: 5658 - DNA, 229 bp, Cricetulus griseus
  misc_feature (26)..(26): n is a, c, g, or t
  misc_feature (107)..(107): n is a, c, g, or t
  misc_feature (182)..(182): n is a, c, g, or t
  misc_feature (189)..(189): n is a, c, g, or t
tgggttaccggggcccccccttcggnggttcggacccacggcgttccgggtagggaactggccctttaacatttttaatttcggggcaggaacttgggccaacacanggggcttttcttgggaggatgatacaaatcttttaacgtgaattgttacagctcatggcattcgttataattttncttcatnagtaatacctctcaataaattggcgggtttggggaattga

SEQ ID NO: 5659 - DNA, 579 bp, Cricetulus griseus; identical to SEQ ID NO: 2017

SEQ ID NO: 5660 - DNA, 246 bp, Cricetulus griseus; identical to SEQ ID NO: 2018

SEQ ID NO: 5661 - DNA, 117 bp, Cricetulus griseus
  misc_feature (70)..(70): n is a, c, g, or t
  misc_feature (89)..(89): n is a, c, g, or t
  misc_feature (92)..(92): n is a, c, g, or t
ctgctgctgatagtgtaagcttttccatgccacggttgctgggtgtttgtccttcctgaggtgaggccancagtgttcctgggagtgtncantctggacacaagtgctgagtcacca

SEQ ID NO: 5662 - DNA, 279 bp, Cricetulus griseus; identical to SEQ ID NO: 2020
  misc_feature (158)..(158): n is a, c, g, or t
  misc_feature (186)..(186): n is a, c, g, or t
  misc_feature (206)..(206): n is a, c, g, or t
  misc_feature (239)..(239): n is a, c, g, or t
  misc_feature (249)..(249): n is a, c, g, or t
  misc_feature (252)..(252): n is a, c, g, or t

SEQ ID NO: 5663 - DNA, 477 bp, Cricetulus griseus
  misc_feature (407)..(407): n is a, c, g, or t
  misc_feature (424)..(424): n is a, c, g, or t
taatcgcttggtaccttcaaaaggaaatggagtaagaaaattctgtgatatccagatccgaaggttacggaggttaggcattgaaaagactgaccccaccacactgacggatgacgagataatcagatttgtaagactggaaattgatccagaaaccataacgtggcagagagtgctggacaccaatgatagattcctgaggaagatcactattggacagtctccaacagagaaaggccacacacgcacggctcagtttgatatctctgtggccagtgaaattatggctgttctggccctcactacttctctgaaagatatgatagagagagtgggcaaaatggtggtggcatccagtaagaaaggcgaacccatcactgttgatgatctgggcgtgagtggagcantggcggcgctgttgaangatgcaatcaaacccaatcttatgcagaccttatagggcacaccggtgtttgt

SEQ ID NO: 5664 - DNA, 579 bp, Cricetulus griseus; identical to SEQ ID NO: 2022
  misc_feature (38)..(38): n is a, c, g, or t
  misc_feature (377)..(377): n is a, c, g, or t
  misc_feature (470)..(470): n is a, c, g, or t
  misc_feature (509)..(509): n is a, c, g, or t
  misc_feature (530)..(530): n is a, c, g, or t
  misc_feature (545)..(545): n is a, c, g, or t
  misc_feature (550)..(550): n is a, c, g, or t

SEQ ID NO: 5665 - DNA, 386 bp, Cricetulus griseus
  misc_feature (70)..(70): n is a, c, g, or t
  misc_feature (181)..(181): n is a, c, g, or t
  misc_feature (196)..(196): n is a, c, g, or t
  misc_feature (226)..(226): n is a, c, g, or t
  misc_feature (229)..(229): n is a, c, g, or t
  misc_feature (305)..(305): n is a, c, g, or t
  misc_feature (358)..(358): n is a, c, g, or t
atatcatggacccacacaaaagcagggctcattaagggcttacaggaggactggaagtgacaatcgcagnagcttgcatggggaatgtgctaggtcctctgtatatatgctgtggtcctttagcctgggtaacagtggggtctctgacccttttgttcctagtgggttgctttgctatgangctttttgctatgangttttattgcatgttgttagatatctccangangcctactcttttctgaagagaagtgtatatgggggagaggaaaagtgtgtggggaattaaactgggaggagtgganggagggaaactgcagtcccaatgtaacatatgagaaaagaataactaaaaagnaaaaaaaaaaccttaaagtatgacatag

SEQ ID NO: 5666 - DNA, 269 bp, Cricetulus griseus
  misc_feature (71)..(71): n is a, c, g, or t
  misc_feature (197)..(197): n is a, c, g, or t
  misc_feature (217)..(217): n is a, c, g, or t
  misc_feature (232)..(232): n is a, c, g, or t
  misc_feature (236)..(236): n is a, c, g, or t
  misc_feature (243)..(243): n is a, c, g, or t
aaagcaagaaaatgagcatcttactcaggaacattctagaatgtggcaataaggatgggggagggaaacantttcccgggctggttcgcaggggaaccctggctcaaggtctggttctgggaatccatggggtagaagtgacttcttgcaaatgggtcacgctactacgcatatggtgcatgtgggtggaacataantgtgacttttgcctcttttnagaggtcaggtttgntganaggtttnaaatgacctggaaagtccatccaatg

SEQ ID NO: 5667 - DNA, 506 bp, Cricetulus griseus
  misc_feature (266)..(266): n is a, c, g, or t
  misc_feature (293)..(293): n is a, c, g, or t
  misc_feature (343)..(343): n is a, c, g, or t
  misc_feature (431)..(432): n is a, c, g, or t
catgtggccctctcaaggtaatttattttacgcatttactgtttaccgaacaaatgtctgactgtgcccgggtgacactgccctccaggggagaggacctttctcagctcatcactgcgatttgcacattgccccacgggacactcaggcctgcattctgtcccctggacgtggaaacattctgaaccggtctctctccctctgctgtgttcagacagaagcttgattgagtcttgagtgacaagcttggaatggttgtggctcanacatcgacctgcccaggaacaccaggncgtgtctagccgacaccttgatgccacaagcatgctccccctctgccgangtctatcggtctatcgggatggtgtgtggccagggggcggagctgaatccctcacacacctttcccactttcttcttgttaaaatccnngacaactcgaaactgaatctccccgaactctacttatctgatgaagtggtgggaccctctcaagttttcttttc

SEQ ID NO: 5668 - DNA, 405 bp, Cricetulus griseus
  misc_feature (190)..(190): n is a, c, g, or t
  misc_feature (225)..(251): n is a, c, g, or t
  misc_feature (337)..(337): n is a, c, g, or t
  misc_feature (375)..(375): n is a, c, g, or t
taaactgcatgtgccgcgccctataagacctttgacctccgcacccaagcgtcgtctggtgtccccgtgggacccagcccctcccagcgtcccgaatgctcttgaggaggaccagagtgagggcagcaagagctactcagcaacaatgtcttcagaagtggagacctcggaaggggtagatgagtcaganaaaaagaactctgtggccccagagaaggaaaatcnnnnnnnnnnnnnnnnnnnnnnnnnnntcctaaaggaagggaccaaggaagcacacgaccgggcagaaaatacccagtttgtcaaagacttcttgaaaggaaacattaagaangagctattttaagcttgccactaccgcactttattttnacatacctcagcccttggaggaggaaatgg

SEQ ID NO: 5669 - DNA, 481 bp, Cricetulus griseus
  misc_feature (429)..(429): n is a, c, g, or t
  misc_feature (438)..(438): n is a, c, g, or t
aaatgggagtacactaaataagcagtaaattttgattcctttttcatgtatcttttgatagctatcatgaagaacagtgtaacagacagtaaaacaaaaccatggctgataaataataaaaatggaggttcaagggcaccatagatcttctatattttattaggtgatgcttgaaatatatttataaccatatctagttttaaatagctgcccaaaaagtaacctagggaatgatttaacctacatggtacttttaataaaacttccccagatgtcctatggtgattttgatgttccctgagaaaagaacagcctcaagtctcgggggcatctgtagaagaggtacagctggaactatctctaatttaacaaaataataataacagtaaaacatgttttctaatgaaaaacatgagatgatatattcanaaactctantagtggctatttatgaatcaacccctatagacctcattgggct

SEQ ID NO: 5670 - DNA, 536 bp, Cricetulus griseus
  misc_feature (306)..(306): n is a, c, g, or t
  misc_feature (433)..(433): n is a, c, g, or t
  misc_feature (453)..(453): n is a, c, g, or t
  misc_feature (496)..(496): n is a, c, g, or t
  misc_feature (505)..(505): n is a, c, g, or t
ctatattaatcactttctttgtaatcccttcacagtcccaggtttagtgaaaaactgctgtaaacacgggggacacagtttaacaatgcaacttttaatgactgttttctttttccttaacctactaatagtttgtggatctgataagcaagggtgggtggctgagaaaaactctgtgttgggcttaatcagtcactacatccaaaccctaacaggtcaccctggtgaccagggcattcgtataagaaaagcattgtatgtgactctgtgcagcacccccagatgccaccctactctgatcatagngaatcttctgcttaggacaccaaagataagaattagatactactctcctttgtgtataatcttgtagacacttacttgatttttttgtttttttactttttaattctaaacgatacaaaatgctggngtatctatcttttcattcanccagcaaaccagaattagattatgctcattttttttcaaaaanggaagtaancaaaataataaatattgactcctgtgtttat

SEQ ID NO: 5671 - DNA, 565 bp, Cricetulus griseus
  misc_feature (105)..(105): n is a, c, g, or t
  misc_feature (234)..(251): n is a, c, g, or t
  misc_feature (284)..(299): n is a, c, g, or t
  misc_feature (400)..(400): n is a, c, g, or t
  misc_feature (509)..(534): n is a, c, g, or t
agcgtgcagccgtcatggtcagccacctgcagctcaacaacggcgccaagtatgcccatcctgggcctgggcacctggaagtcccctcccggccaggtgactgangccgtgaaggctgccattgacattgggtaccgccacattgactgtgcccaggtgtaccagaatgagaaggaggtgggaatggccctccaggagaagctcaaggagcaggtggtgaaacgccaagacctnnnnnnnnnnnnnnnnnngtggtgcacgtttcacgacaagagcatggtgannnnnnnnnnnnnnnngacgctcagtgacctgcagctggactacctggacctctaccttattcactggccaacaggtttcaagcccgggcctgattacttcccactggacgaatcangaaatgtgattcccagtgagactgattttgtggacacttggacggccatggaacagctggtggatgaaggtttggtgaaatccattggtgtctccaacttcaaccctcnnnnnnnnnnnnnnnnnnnnnnnnnncccggcttaaaatataagcctgccggttaat

SEQ ID NO: 5672 - DNA, 377 bp, Cricetulus griseus
  misc_feature (225)..(260): n is a, c, g, or t
  misc_feature (313)..(313): n is a, c, g, or t
  misc_feature (351)..(351): n is a, c, g, or t
atggacagaaatttagaggtgcaggtccaaacaagaaagtggccaaggcaagtgcagcactagctgccttagagaagttgttttctggacccaatgcagcaaataataagaaaaaaaagatcattcctcaggcaaagggtgttgtgaatacagcagtatctgcagcagttcaggcagttcggggcagaggaagaggaactctgacaaggggagcgttcgtggggnnnnnnnnnnnnnnnnnnnnnnnnnnnnnnnnnnnnggaacaccatatggttacagcactgctgcccctgcatatggtttgcccaaganaatggttctgttacccgttatgaaattcccaacatatnctgttcccccactactcattctttta

SEQ ID NO: 5673 - DNA, 483 bp, Cricetulus griseus
  misc_feature (122)..(122): n is a, c, g, or t
  misc_feature (249)..(249): n is a, c, g, or t
  misc_feature (367)..(367): n is a, c, g, or t
  misc_feature (403)..(418): n is a, c, g, or t
gaggcgcgatggcaggtgtaggggtcgagcggctgcaggcgatggtgcgatttacgctgctggtgctcactgtgtgtgctgcgggtgcccatgggctctatttccacatcggcgagactganaagcgttgcttcatcgaggaaatacccgacgagaccatggtcatcggcaactatcgaacccagatgtgggacaagcagaaggaggtcttcctgccctcgacccctggcctgggcatgcacgtagaantgaaggacccggacggcaaggtggtactgtcccgacaatatggttccgagggccgcttcaccttcacgtcccacacacccggtgaccatcagatttgtctgcactccaactccaccangatggctctcttcgctggaggaaaactgcgtgtacnnnnnnnnnnnnnnnntggggagcatgccaacaactaccctgagattgctgctaaagataagttaacagagctgcagcttt

SEQ ID NO: 5674 - DNA, 324 bp, Cricetulus griseus
  misc_feature (114)..(114): n is a, c, g, or t
  misc_feature (189)..(189): n is a, c, g, or t
  misc_feature (246)..(246): n is a, c, g, or t
  misc_feature (289)..(289): n is a, c, g, or t
ggtaagtgtgtgctgtctgagcatgtgcagatggaggagaagtgtgggggcttggtggggatccagaccaagatcgtgcaggtgtcagcaatggaggatgggaccgtcatcaangataccaatgtggtgctggagatccccgctgccaccaccattgcctgtggcatcatcgagctgtatgtgaaacangatggccagtttgaattctgtctcctccaagggaaacatggtggctttgagcatganaagaaagttgactctgtctacttggaccccctggcctacaganaatttgcattcctggacatgccagatgggggtcaa

SEQ ID NO: 5675 - DNA, 285 bp, Cricetulus griseus
  misc_feature (37)..(37): n is a, c, g, or t
  misc_feature (119)..(146): n is a, c, g, or t
  misc_feature (181)..(181): n is a, c, g, or t
  misc_feature (213)..(213): n is a, c, g, or t
atattggttgtgtacattttaatcccagtactcgggnagtcagagtacaagtgaatccatgtgagctcgaggccagagagttctaggccagctagggctgcatagtgaaaccctatttnnnnnnnnnnnnnnnnnnnnnnnnnnnnataccttattaaatttagactaagcagaaaggaantgggaggagttgtttgagaaagaacaagaaantggcctcagggacataacactgttagacctgcctttcttcccacagctcatgtgcatgtaaccttgctccat

SEQ ID NO: 5676 - DNA, 237 bp, Cricetulus griseus
  misc_feature (120)..(120): n is a, c, g, or t
  misc_feature (129)..(129): n is a, c, g, or t
  misc_feature (164)..(164): n is a, c, g, or t
  misc_feature (181)..(181): n is a, c, g, or t
ctctggggaagctggaccgccccctctacagagttggcacagaaggcccagctcattaattcccaaggatggggaggccaggtctccactggagtaactctccgagggaccgcagcccanacacagggnatgaaactgttaggtcatgggggtcccagcttaanggggtcagccaccccangctggtaagggcagtgtggcccactctcaaggtgagggaccttctgcggagcccta

SEQ ID NO: 5677 - DNA, 409 bp, Cricetulus griseus; identical to SEQ ID NO: 2035
  misc_feature (173)..(198): n is a, c, g, or t

SEQ ID NO: 5678 - DNA, 577 bp, Cricetulus griseus
ggcacttccgcgggggagcagccggagagggagccatggggacagtgcacgcccggagtctggagcctcttccatcgagtggacctgactttggagctttgggagaagaagctgagtttgtggaagttgaacctgaggcgaaacaggaaattctggaaaacaaagatgtggtggttcagcatgttcattttgatggacttggacggactaaggatgacatcatcatttgtgaaattgaagatgtttttaaggctaaaaacctcattgaggtaatgcggaaatcacatgaaacccgtgaaaaactgcttcgcctaggaatttttaggcaagtggatgttttgatcgacacatgtcatggtgatgatgcactgccaaatggattagatgtcacctttgaagtgacagagttaaggaggcttactggcagttacaacaccatggttggaaacaatgaaagcagtatggtacttggcctcaaactccccaatctcctatgacgtgcagaaaaagtgacttttcagttttcatatggaaccaaagaaacttcctatggcctgtcattcttcataccacagct

SEQ ID NO: 5679 - DNA, 414 bp, Cricetulus griseus; identical to SEQ ID NO: 2037

SEQ ID NO: 5680 - DNA, 519 bp, Cricetulus griseus; identical to SEQ ID NO: 2038
  misc_feature (199)..(303): n is a, c, g, or t

SEQ ID NO: 5681 - DNA, 579 bp, Cricetulus griseus; identical to SEQ ID NO: 2039

SEQ ID NO: 5682 - DNA, 467 bp, Cricetulus griseus; identical to SEQ ID NO: 2040

SEQ ID NO: 5683 - DNA, 331 bp, Cricetulus griseus; identical to SEQ ID NO: 2041

SEQ ID NO: 5684 - DNA, 193 bp, Cricetulus griseus; identical to SEQ ID NO: 2042

SEQ ID NO: 5685 - DNA, 582 bp, Cricetulus griseus; identical to SEQ ID NO: 2043

SEQ ID NO: 5686 - DNA, 578 bp, Cricetulus griseus; identical to SEQ ID NO: 2044

SEQ ID NO: 5687 - DNA, 489 bp, Cricetulus griseus
ccgccggggtcggtgaaggatcccaagatggccgggcgtaaacttgccctaaaaaccattgattgggtgtcttttgtggagatcatacctcgaaaccaaaagacaattgcaaactccctgaagtcttggaatgagaccctccacaccaggttggctaatctgcctgagaaaccaccagcgattgactgggcttattacaagaccagagtggccaaggctggcttggtggatgattttgaaaagaagtacaatgccctgaagattccagtgcctgaggataaatacacagccctggtggacaatgaggaaagggaggatgtgaagaactgtgctgcgttcctgtctgaatcccaggacaggatccaggaatatgagaagcagctggagaagattaagaacatcatcccctttgatcagatgaccattgatgacttgaatgaagtcttcccagaaaccaagctggacaagaagaagtacccctactggcct

SEQ ID NO: 5688 - DNA, 539 bp, Cricetulus griseus
  misc_feature (160)..(172): n is a, c, g, or t
  misc_feature (174)..(191): n is a, c, g, or t
gctaaggtactgactgctaactaatttcaaagatttttacaaaaaacgtagagccaacctggtagtggtgtatgcctgtgatctcggcactggggaggcagaggtaggcaaatctgcatatagtgagaacatattttagagaagcaatctcaaattgtcnnnnnnnnnnnnngnnnnnnnnnnnnnnnnnngctttatgttttgagccaaggtctcactatataggcctggcctggaactcattatgtagactaggatgaccttaaactcatggggatccatctgcctcagcctcccaaatactggaaccaaaggcatgtaccaccaggtctggctgcaaattgacttttaaaattaactacctaatttgttttgggccacttacatattagtttctgtacatctctaaaagagtgacttttaaaatctataaaatgttaagtttaagttttgggttgttggggcagtagttacattgtgactctcacatccgccttagttaagtgcatcaccagtcaatagaatgtctgcagggctta

SEQ ID NO: 5689 - DNA, 371 bp, Cricetulus griseus; identical to SEQ ID NO: 2047

SEQ ID NO: 5690 - DNA, 580 bp, Cricetulus griseus; identical to SEQ ID NO: 2048

SEQ ID NO: 5691 - DNA, 327 bp, Cricetulus griseus; identical to SEQ ID NO: 2049

SEQ ID NO: 5692 - DNA, 579 bp, Cricetulus griseus; identical to SEQ ID NO: 2050
  misc_feature (440)..(457): n is a, c, g, or t

SEQ ID NO: 5693 - DNA, 509 bp, Cricetulus griseus; identical to SEQ ID NO: 2051

SEQ ID NO: 5694 - DNA, 404 bp, Cricetulus griseus; identical to SEQ ID NO: 2052

SEQ ID NO: 5695 - DNA, 200 bp, Cricetulus griseus; identical to SEQ ID NO: 2053

SEQ ID NO: 5696 - DNA, 456 bp, Cricetulus griseus
cagtgggtgtttgactgtgtgaatgcccggctcctcctccctgtggcagagtacttccctggggtgcagctgcccccacacctctcacccttcgtatctgagaaggaaggagattacattccccctgagaagctgaagctactggctctgcagcggggagaagatccaggagacttgaaagaagaagaggatgaagatgaggatgaggatgatgaagatgatgacaacgaaggtgatggtgatgtgggggaaaatgaggatgaggaagaagtggacgctgattcagagaaggaggaggaagcgcacctgtcggtcttggagcagcagaggctggaagggaagaagccccaggtggtggccggcactgtgaaactggaagacaagcagcggctggcccaggaagaagaaagtgaggccaatcgcctggccatcatgatgatgaaaaagcgggagaag

SEQ ID NO: 5697 - DNA, 176 bp, Cricetulus griseus; identical to SEQ ID NO: 2055

SEQ ID NO: 5698 - DNA, 348 bp, Cricetulus griseus
taggaacgcgggtcttcccgctgttgctgtggggaccacgggccgaacacacgatcccggcctgaggtggtggtgggaagcccaccgcactttgctgcgacgtcatggagggtggcgggggaagtggcaacaaaacctccggcgggttagctggcttcttcggagcaggaggagcgggctactcgcactctgatttggccggcgttccgcgtgagtatcaggcctagcttgctacctctctctgtctgcttcctgggacagctagaaatgtgtagcattccttgtcccctttcttgctcgcgttcacaaggttcaccgtcagtgatggggtttccagactgaacggaa

SEQ ID NO: 5699 - DNA, 581 bp, Cricetulus griseus; identical to SEQ ID NO: 2057

SEQ ID NO: 5700 - DNA, 450 bp, Cricetulus griseus; identical to SEQ ID NO: 2058

SEQ ID NO: 5701 - DNA, 490 bp, Cricetulus griseus; identical to SEQ ID NO: 2059

SEQ ID NO: 5702 - DNA, 295 bp, Cricetulus griseus; identical to SEQ ID NO: 2060

SEQ ID NO: 5703 - DNA, 578 bp, Cricetulus griseus; identical to SEQ ID NO: 2061

SEQ ID NO: 5704 - DNA, 575 bp, Cricetulus griseus; identical to SEQ ID NO: 2062
  misc_feature (521)..(521): n is a, c, g, or t

SEQ ID NO: 5705 - DNA, 212 bp, Cricetulus griseus; identical to SEQ ID NO: 2063
  misc_feature (119)..(137): n is a, c, g, or t

SEQ ID NO: 5706 - DNA, 459 bp, Cricetulus griseus; identical to SEQ ID NO: 2064

SEQ ID NO: 5707 - DNA, 556 bp, Cricetulus griseus; identical to SEQ ID NO: 2065
  misc_feature (139)..(139): n is a, c, g, or t
  misc_feature (334)..(350): n is a, c, g, or t
  misc_feature (498)..(498): n is a, c, g, or t

SEQ ID NO: 5708 - DNA, 576 bp, Cricetulus griseus; identical to SEQ ID NO: 2066

SEQ ID NO: 5709 - DNA, 474 bp, Cricetulus griseus
aacagaagctatgacccacttgggtttaacagatatctatagaacattccatccaaacacaaaagaatataccttctcagtgccacatggaaccttctctaaaatcaacacatcctcagcaacatagcaaacctcaacagatacgaaaaaattggaataaccccattgtatcttattggatcaccatggtttaaagttagaattcaacagcaacacaattgcagaaaccatacaaacacagggaaattgaacaatgcacaattacaccattcctgggtcaaggaagaaataaaaacagaaattaaagacttcctagaatccaatgagaattaagacacagcattaataaagtaaaaacaaagaatacaaagaatcactgtaacaaaagaattggttctttgagaaaatcaataagatagagaaacctttatccaaactaaccaaaaggcaaaaagagaacatgcacattaacaa

SEQ ID NO: 5710 - DNA, 339 bp, Cricetulus griseus; identical to SEQ ID NO: 2068

SEQ ID NO: 5711 - DNA, 566 bp, Cricetulus griseus; identical to SEQ ID NO: 2069
  misc_feature (140)..(240): n is a, c, g, or t

SEQ ID NO: 5712 - DNA, 454 bp, Cricetulus griseus; identical to SEQ ID NO: 2070
  misc_feature (182)..(203): n is a, c, g, or t

SEQ ID NO: 5713 - DNA, 89 bp, Cricetulus griseus
  misc_feature (38)..(38): n is a, c, g, or t
tcccttaggctgattacccattttaccaccattccagnaataccctagctgagggggcgattccttcattcagttcacccccaccattt

SEQ ID NO: 5714 - DNA, 578 bp, Cricetulus griseus; identical to SEQ ID NO: 2072

SEQ ID NO: 5715 - DNA, 158 bp, Cricetulus griseus
atgacttaccattctatccatagattaatgcatccctcaactgtcatcagagaggcttctttacacagtagatggtaaagagacccacaactgtccaagtaagaaaataaaagtaagagacccagaatgggcagcttttaattaatggatcacatcaa

SEQ ID NO: 5716 - DNA, 580 bp, Cricetulus griseus; identical to SEQ ID NO: 2074

SEQ ID NO: 5717 - DNA, 572 bp, Cricetulus griseus; identical to SEQ ID NO: 2075

SEQ ID NO: 5718 - DNA, 579 bp, Cricetulus griseus; identical to SEQ ID NO: 2076

SEQ ID NO: 5719 - DNA, 579 bp, Cricetulus griseus; identical to SEQ ID NO: 2077

SEQ ID NO: 5720 - DNA, 448 bp, Cricetulus griseus; identical to SEQ ID NO: 2078

SEQ ID NO: 5721 - DNA, 579 bp, Cricetulus griseus; identical to SEQ ID NO: 2079

SEQ ID NO: 5722 - DNA, 508 bp, Cricetulus griseus; identical to SEQ ID NO: 2080

SEQ ID NO: 5723 - DNA, 512 bp, Cricetulus griseus; identical to SEQ ID NO: 2081

SEQ ID NO: 5724 - DNA, 578 bp, Cricetulus griseus; identical to SEQ ID NO: 2082

SEQ ID NO: 5725 - DNA, 504 bp, Cricetulus griseus; identical to SEQ ID NO: 2083

SEQ ID NO: 5726 - DNA, 578 bp, Cricetulus griseus; identical to SEQ ID NO: 2084

SEQ ID NO: 5727 - DNA, 578 bp, Cricetulus griseus; identical to SEQ ID NO: 2085

SEQ ID NO: 5728 - DNA, 167 bp, Cricetulus griseus; identical to SEQ ID NO: 2086

SEQ ID NO: 5729 - DNA, 500 bp, Cricetulus griseus; identical to SEQ ID NO: 2087
  misc_feature (42)..(62): n is a, c, g, or t
  misc_feature (444)..(463): n is a, c, g, or t

SEQ ID NO: 5730 - DNA, 580 bp, Cricetulus griseus; identical to SEQ ID NO: 2088
  misc_feature (468)..(492): n is a, c, g, or t

SEQ ID NO: 5731 - DNA, 577 bp, Cricetulus griseus
cagatcgacatacccgatgcactcagtgaaagagataaggtcaagtttacagtacacaccaagaccacactgcccacattccagagcccagaattttctgttacaaggcagcatgaagactttgtgtggctgcatgacactcttacagaaacaacagattatgccgggcttattatccctcctgctcctacaaagccagacttcgatggccctcgagagaagatgcagaaactgggagaaggtgaaggatctatgacaaaagaagagtttgctaagatgaagcaagaactggaagctgagtatctcgctgtctttaagaagactgtgtcttcccatgaagtctttcttcagcggctttcttctcaccctgttctcagtaaagaccgaaactttcatgttttcctggaatatgatcaggatgtaaggcaatttttccattttcatagttgaaatacttctaaaatgagcttcttgagtttgaatttatcaatacagagaaaaaggtggagaagcaatgctttcccttcctgcttaaatccatttaaaggtcacttttaaaagctactgaaagaaaaca

SEQ ID NO: 5732 - DNA, 553 bp, Cricetulus griseus; identical to SEQ ID NO: 2090

SEQ ID NO: 5733 - DNA, 486 bp, Cricetulus griseus; identical to SEQ ID NO: 2091
  misc_feature (60)..(129): n is a, c, g, or t
  misc_feature (152)..(204): n is a, c, g, or t
  misc_feature (233)..(279): n is a, c, g, or t
  misc_feature (300)..(319): n is a, c, g, or t
  misc_feature (321)..(369): n is a, c, g, or t
  misc_feature (380)..(406): n is a, c, g, or t
  misc_feature (426)..(448): n is a, c, g, or t

SEQ ID NO: 5734 - DNA, 243 bp, Cricetulus griseus
gaaagttatccgtaaaaacattgcgaagaagtgccctgagctcttctctgagctggctgaagacaagaaaactataagaaattctacgaggccttctccaagaacttaaagcttgcaatccatgatgattcccttaatccgtcggcgttctctcttgactgttgcgctatcatacctctccagctgggagatgaaatgacttccctgtccgaaaatgtgtgccgtgttgtaggagacccaaaa

SEQ ID NO: 5735 - DNA, 578 bp, Cricetulus griseus; identical to SEQ ID NO: 2093
  misc_feature (111)..(137): n is a, c, g, or t

SEQ ID NO: 5736 - DNA, 211 bp, Cricetulus griseus; identical to SEQ ID NO: 2094
  misc_feature (120)..(120): n is a, c, g, or t
  misc_feature (135)..(135): n is a, c, g, or t

SEQ ID NO: 5737 - DNA, 581 bp, Cricetulus griseus; identical to SEQ ID NO: 2095
  misc_feature (62)..(213): n is a, c, g, or t
  misc_feature (231)..(300): n is a, c, g, or t
  misc_feature (303)..(437): n is a, c, g, or t
  misc_feature (439)..(461): n is a, c, g, or t
  misc_feature (477)..(493): n is a, c, g, or t
  misc_feature (495)..(507): n is a, c, g, or t

SEQ ID NO: 5738 - DNA, 509 bp, Cricetulus griseus; identical to SEQ ID NO: 2096
  misc_feature (240)..(264): n is a, c, g, or t

SEQ ID NO: 5739 - DNA, 396 bp, Cricetulus griseus; identical to SEQ ID NO: 2097

SEQ ID NO: 5740 - DNA, 546 bp, Cricetulus griseus
  misc_feature (123)..(154): n is a, c, g, or t
cgtggaggagggcgaggaaacctgcgtcttgtcctcacacagcgggactgcgggctccaagtcggggggcgacaagatgttctccctcaagaagtggaacgcggtagccatgtggagctgggnnnnnnnnnnnnnnnnnnnnnnnnnnnnnnnngtccaggtgatggatgcctgcctcagatgtcaagccgaaaacaaacaagaggactgtgttgtggtctggggagaatgtaatcattcctttcacaactgctgcatgtctctgtgggtgaaacagaacaatcgctgtcctctctgccagcaggactgggtggtccaaagaattggcaaatgagaggtagtagaaggctttcctggtgtggttgtgaccctggatgatcttgctgccaagtgaccggacgaaggctataacactccagcggatcagttcttcagatagaaagggtgcagtcttttgagactcatccagggcatggcttagcattttgtcagttgaattttgagaagttgtctacaagatagataatttattaaaaatggcctttc

SEQ ID NO: 5741 - DNA, 507 bp, Cricetulus griseus; identical to SEQ ID NO: 2099

SEQ ID NO: 5742 - DNA, 581 bp, Cricetulus griseus; identical to SEQ ID NO: 2100
  misc_feature (309)..(323): n is a, c, g, or t

SEQ ID NO: 5743 - DNA, 581 bp, Cricetulus griseus
  misc_feature (259)..(273): n is a, c, g, or t
taaaacaaaaagaaagcattcattctggaaataaactatattatctttgtaaatcaattgagtatataaagtacttgctaattattcctgaaggattggtagaggaggctttagcttctttctttagagtcaaagaaaggtactttgagggtagtaaatacttttaggaattaaaaaaataattcacaaacattgaacgtattttcctagcatgtctatttttgatctgaaatacttaaatactgacatagaaatggannnnnnnnnnnnnnnagacttcaaagttaaatgaggcgaaatatcatgggtagctggattagatgtcagttacaacccaaatgtgattttcaagtggactttgaatgtccctaaggatgagatgggagatgatgaattctcaatgcctcacctaatgcactgaaaagatgcatttactgccttttttgttttctgcctctgacttgtctttgtccagattcctttccctaagaacagtatttctgttaggatcagataaactacataccatccgagtccacagggtcttccacttcctctgtgtaattcacttctgtcctcac

SEQ ID NO: 5744 - DNA, 579 bp, Cricetulus griseus; identical to SEQ ID NO: 2102
  misc_feature (530)..(530): n is a, c, g, or t

SEQ ID NO: 5745 - DNA, 442 bp, Cricetulus griseus; identical to SEQ ID NO: 2103

SEQ ID NO: 5746 - DNA, 442 bp, Cricetulus griseus
aaaacactttgtcctcatgtggttatcacgtaagatcacaaagcaagtcagtgttagagccaggactaaaagcgaatgtaagcctggtgatccaaatcttccactgaaactaacctctgaagggagtcagtcccaggagactgggcatacaaatgacctcccaggtttgcagaactccaatgtgggcattcccaagcaggcacggcccatgaggctccattgtgtagcaagatgtacactcagtctcgcacagacattgtgtttttaggatgggtccagcaccaggttgccatctttggaaatagcttacttttgagtcatgagactgacttatctgtacatggattcagacatgcagtttaatatccctgtttagagacctgaggagaactggatgtgggtcagagaatggagaattaaatgtatatgagataaagaccaa

SEQ ID NO: 5747 - DNA, 499 bp, Cricetulus griseus; identical to SEQ ID NO: 2105

SEQ ID NO: 5748 - DNA, 506 bp, Cricetulus griseus; identical to SEQ ID NO: 2106

SEQ ID NO: 5749 - DNA, 435 bp, Cricetulus griseus; identical to SEQ ID NO: 2107

SEQ ID NO: 5750 - DNA, 579 bp, Cricetulus griseus; identical to SEQ ID NO: 2108

SEQ ID NO: 5751 - DNA, 578 bp, Cricetulus griseus; identical to SEQ ID NO: 2109

SEQ ID NO: 5752 - DNA, 555 bp, Cricetulus griseus; identical to SEQ ID NO: 2110
  misc_feature (524)..(524): n is a, c, g, or t

SEQ ID NO: 5753 - DNA, 498 bp, Cricetulus griseus; identical to SEQ ID NO: 2111

SEQ ID NO: 5754 - DNA, 81 bp, Cricetulus griseus; identical to SEQ ID NO: 2112
  misc_feature (41)..(41): n is a, c, g, or t

SEQ ID NO: 5755 - DNA, 567 bp, Cricetulus griseus; identical to SEQ ID NO: 2113
  misc_feature (28)..(47): n is a, c, g, or t
  misc_feature (54)..(86): n is a, c, g, or t
  misc_feature (88)..(124): n is a, c, g, or t

SEQ ID NO: 5756 - DNA, 579 bp, Cricetulus griseus; identical to SEQ ID NO: 2114

SEQ ID NO: 5757 - DNA, 556 bp, Cricetulus griseus; identical to SEQ ID NO: 2115
  misc_feature (357)..(396): n is a, c, g, or t
  misc_feature (398)..(418): n is a, c, g, or t

SEQ ID NO: 5758 - DNA, 442 bp, Cricetulus griseus; identical to SEQ ID NO: 2116
  misc_feature (143)..(160): n is a, c, g, or t

SEQ ID NO: 5759 - DNA, 464 bp, Cricetulus griseus
  misc_feature (399)..(399): n is a, c, g, or t
ttatctcgctcaaatcttctcctctttaggaacggaggggtaatctaactcctgaggaaagagatgcaaggacagttttctgcatgcaactggcagcaagaattcgaccaagggatttggaagagtttttctctacagtaggaaaggttcgagatgtgaggatgatttctgatagaaattcaagacgttccaaaggaattgcctatgtggaatttgttgatgttagttcagtgcctctagcaattggattaactggccaacgtgttttatgagtgccaattatagtacaggcatcacaggtaacttcttgatttagatattggtcattgagctgggtgtcacatcatatgcagcagtggcttatggttaggcaggagaattggaatcaatttgactcancttgggctatgtattaattattcattaacagacctaataagtggaatcaatgagatgggagttta

SEQ ID NO: 5760 - DNA, 316 bp, Cricetulus griseus; identical to SEQ ID NO: 2118
  misc_feature (38)..(93): n is a, c, g, or t
  misc_feature (107)..(139): n is a, c, g, or t
  misc_feature (154)..(173): n is a, c, g, or t
  misc_feature (184)..(243): n is a, c, g, or t

SEQ ID NO: 5761 - DNA, 215 bp, Cricetulus griseus
tccgcctgcctttgcctcccaattgcgggggttaaaggcatttccctcctacaccacctggctaaaaattgatttttgaaattatgcgttaatgggtatctgggggtaggtaattatggatgcccaaggaaaccaaaggaaggggttgattccctggggctggatttagagggggttgggccacctggggggaaccgaactcaggtcctttgaaa

SEQ ID NO: 5762 - DNA, 492 bp, Cricetulus griseus; identical to SEQ ID NO: 2120
  misc_feature (396)..(396): n is a, c, g, or t

SEQ ID NO: 5763 - DNA, 567 bp, Cricetulus griseus; identical to SEQ ID NO: 2121

SEQ ID NO: 5764 - DNA, 567 bp, Cricetulus griseus; identical to SEQ ID NO: 2122

SEQ ID NO: 5765 - DNA, 578 bp, Cricetulus griseus; identical to SEQ ID NO: 2123

SEQ ID NO: 5766 - DNA, 434 bp, Cricetulus griseus; identical to SEQ ID NO: 2124

SEQ ID NO: 5767 - DNA, 550 bp, Cricetulus griseus
gcttgtctgttctgaggagcagtaggcagtttcctccgtccgatatctcgcataccgaagtgcgcgtctccacctcatggaagactcgatggacatggacatgagccctcttaggccacagaactaccttttcggttgtgaactaaaagctgacaaagattatcactttaaggtggataatgatgagaatgaacaccagttgtcactaagaacggttagtttaggggcaggggcaaaagatgaattacacatcgtagaggcagaagcaatgaattatgaaggcagtccaattaaagtaacgctggcaacattgaaaatgtccgtacaaccaacagtttcccttggtggctttgaaattacaccacctgtggtgttacagttgaagtgtggttcaaggcctgtgcacattagtggacagcatctagtagctgtagaggaagatgcagagtcagaggatgaagatgaggaggatgtgaaactcttaagtatgtctggcaagcgatctgctcctggaggtggtagcaaagttccacagaaaaaagtaaaaatc

SEQ ID NO: 5768 - DNA, 474 bp, Cricetulus griseus; identical to SEQ ID NO: 2126
  misc_feature (342)..(342): n is a, c, g, or t
  misc_feature (411)..(411): n is a, c, g, or t

SEQ ID NO: 5769 - DNA, 579 bp, Cricetulus griseus; identical to SEQ ID NO: 2127

SEQ ID NO: 5770 - DNA, 578 bp, Cricetulus griseus; identical to SEQ ID NO: 2128

SEQ ID NO: 5771 - DNA, 579 bp, Cricetulus griseus; identical to SEQ ID NO: 2129

SEQ ID NO: 5772 - DNA, 303 bp, Cricetulus griseus; identical to SEQ ID NO: 2130
  misc_feature (187)..(187): n is a, c, g, or t

SEQ ID NO: 5773 - DNA, 580 bp, Cricetulus griseus; identical to SEQ ID NO: 2131

SEQ ID NO: 5774 - DNA, 574 bp, Cricetulus griseus
ctgtagaagacttccctacagagaaccctaacgataactctgtgctagggaacctgcgttctctgctccagatcttgcgccaagatatgactccaggaggtcattcagggggccgccgtcgccagcggggccgctcggtgcgtcgtctggttcgccgtctccgtcgttggggcctacttcctcgaaccaataccccagctcggacccctgagaccagatcccaggtcacagcatctgctgctccctctgaggccctggatgacagcacaggccaaagctgtgagggcggagcagtaggaggacaggatggggagcaggctcctccactacccgtcaagccccccatcccaaccccaagcacacttccagcccttgctactgtctctgagcccccaggacctctcccctcagtgcctctagaaccctcactgctgtctggagttgtacaggtcctccgaggccgtctgctacccagcctgtggcccccatgacccacttggaccccagctggacatcacacaacagtcctggccccaaaggatgaggatgatgtgttgttaatgccgctggctga

SEQ ID NO: 5775 - DNA, 90 bp, Cricetulus griseus
gaaccccaaatacggaaaattgtggatcaaataagacctgataggcaaaccctaatgtggagtgcaacttggccaaaagaagtaagacag

SEQ ID NO: 5776 - DNA, 578 bp, Cricetulus griseus; identical to SEQ ID NO: 2134

SEQ ID NO: 5777 - DNA, 540 bp, Cricetulus griseus
acatttgccagcctctacgcacaagcctgaaaggtcctatggaaacactccatgtggctctgggctcttctctgattgctatgagtttaattctaatctttacaggatggatgtcagtgtcagcactttcttaattatgagtattggaagacactggaatctccatgtgtccaatgacaaggaactttacatttcatttgattttattctttgattttaagccttattttcacaaaacagcctagctggaatattgatgccatactgtattttgcatgctgctttcttccctagaggcattgagggcaactgtacttggtaacttttgctctctcaagatttgtcattttttcagccattcttcatgcccatgccagcaagagcttttatatcataatgataaagccagctcatacttatttgtccctgtaggtggtggtagtggtcagaaatggcttcaggcatccatgagtttcaagcttcagaagtacctggcaccttaatccaagcaaaaatatgacagcttataaaaacaaccaa

SEQ ID NO: 5778 - DNA, 383 bp, Cricetulus griseus; identical to SEQ ID NO: 2136

SEQ ID NO: 5779 - DNA, 570 bp, Cricetulus griseus; identical to SEQ ID NO: 2137
  misc_feature (69)..(101): n is a, c, g, or t
  misc_feature (114)..(145): n is a, c, g, or t
  misc_feature (147)..(184): n is a, c, g, or t
  misc_feature (222)..(240): n is a, c, g, or t
  misc_feature (242)..(263): n is a, c, g, or t
  misc_feature (267)..(289): n is a, c, g, or t
  misc_feature (295)..(337): n is a, c, g, or t
  misc_feature (344)..(370): n is a, c, g, or t
  misc_feature (385)..(415): n is a, c, g, or t
  misc_feature (427)..(444): n is a, c, g, or t

SEQ ID NO: 5780 - DNA, 578 bp, Cricetulus griseus; identical to SEQ ID NO: 2138
  misc_feature (87)..(108): n is a, c, g, or t

SEQ ID NO: 5781 - DNA, 451 bp, Cricetulus griseus
tcgaccccacgcccgctccggtgaatggctgcactctggcatgtggtatgcgagatgacatctctgagattatggcgaaaccacattacacacgagcgccgcatgtgcatgccctctgcacatggagaatgagcctggtgcaatccataggcagagagatgccctccggggtgcagtcctaaatggaggcccccccagcacccgtataacaccttgattctctaaatgggctagtgatgagatgccgtccactaacactggggaaagcaacctgcaagaggccatgctgaagacctgcaagaacagggacatgtgagaaaatcactgaagattccgctgctactacatttgatgccctgaacgctcgtgtcacggagcttgaacggcagctatctcgggggggccgatacaaatgcctcatttgcatggactcatactcgatgcccctgac

SEQ ID NO: 5782 - DNA, 574 bp, Cricetulus griseus; identical to SEQ ID NO: 2140

SEQ ID NO: 5783 - DNA, 580 bp, Cricetulus griseus; identical to SEQ ID NO: 2141

SEQ ID NO: 5784 - DNA, 330 bp, Cricetulus griseus; identical to SEQ ID NO: 2142

SEQ ID NO: 5785 - DNA, 579 bp, Cricetulus griseus; identical to SEQ ID NO: 2143

SEQ ID NO: 5786 - DNA, 334 bp, Cricetulus griseus; identical to SEQ ID NO: 2144
  misc_feature (81)..(98): n is a, c, g, or t
  misc_feature (222)..(239): n is a, c, g, or t

SEQ ID NO: 5787 - DNA, 305 bp, Cricetulus griseus
  misc_feature (61)..(61): n is a, c, g, or t
gtctccgcctccgccggcggggaccccaagctaccacgactgcgggacccacagccctgcnagatacggagccacgatgttcccgagggagaccaagtggaacatctcgttcgctccctgcggcttcctcggcgtctaccacattggcggggcctcctgcctccgtgagcacgcgcccttcctggtggccaacgccaaccacatctacggcgcctcggccggtgcgctcaccgccacggctctggtcactggggcctgcctgggtgaagcagcggcaaacattattgatgtgtccaaggaggccc

SEQ ID NO: 5788 - DNA, 536 bp, Cricetulus griseus; identical to SEQ ID NO: 2146

SEQ ID NO: 5789 - DNA, 495 bp, Cricetulus griseus
acccacgtcgttccgtcccacgtcgttccgtcccacgtccgtccgggaaaaaccaggaagtctccaagtcgggatctgtgaaggaccggatatcgggaagttcaaagcgttcgttggaggggagcgatgactacgggaaggcgcagatatccaaaagcagcagcaaggaatccaggtcatccaaactccacaaggagaagacacgcaaggaacgtgagttaaagtctggacacaaggaccgcagcaaaagccatcggaagagggaaacacccaaaagttacaaaacggtagatagccccaaacggaggtccaggagtccccataggaagtggtctgacagctccaagcaagatgacagcccttcgggagcttcttatggccaagactatgaccttagccccccgaggtctcacacctctagcaattatgactcctacaagaagagtcctggcggtacctcaagaaggcagtcaatcagtccaccctacaaagagc

SEQ ID NO: 5790 - DNA, 310 bp, Cricetulus griseus; identical to SEQ ID NO: 2148

SEQ ID NO: 5791 - DNA, 578 bp, Cricetulus griseus; identical to SEQ ID NO: 2149

SEQ ID NO: 5792 - DNA, 579 bp, Cricetulus griseus; identical to SEQ ID NO: 2150

SEQ ID NO: 5793 - DNA, 580 bp, Cricetulus griseus; identical to SEQ ID NO: 2151
  misc_feature (200)..(220): n is a, c, g, or t
  misc_feature (459)..(482): n is a, c, g, or t

SEQ ID NO: 5794 - DNA, 374 bp, Cricetulus griseus; identical to SEQ ID NO: 2152
  misc_feature (150)..(167): n is a, c, g, or t
  misc_feature (205)..(251): n is a, c, g, or t

SEQ ID NO: 5795 - DNA, 491 bp, Cricetulus griseus; identical to SEQ ID NO: 2153
  misc_feature (120)..(142): n is a, c, g, or t

SEQ ID NO: 5796 - DNA, 400 bp, Cricetulus griseus; identical to SEQ ID NO: 2154
  misc_feature (342)..(342): n is a, c, g, or t

SEQ ID NO: 5797 - DNA, 579 bp, Cricetulus griseus; identical to SEQ ID NO: 2155

SEQ ID NO: 5798 - DNA, 410 bp, Cricetulus griseus
agagaaagtgacgttgttgatgtgatggagaagtgcgatgacggatggttcgtgggaacctcaagaagaaccaaattctttggtacctttcccggaaactatgtcaagaggctgtgaatcaccttcctccttatttactccacatttcaacaacacatctgcagaactcacctgaaatgtccccgcaggcctgttgctgtcttgccttatggtttccacaggccatctccatctccacctgctgccaccagatcaccagcagtgactgccgctgggagcttcaaggaaatgtggcaaatttacaccctcataaatgcagtttcctgctttctgccctgaacttttaaatgtctgtgatatggaataagaatgaaagtcatcataattttaaaaagtggaatagttgaggc

SEQ ID NO: 5799 - DNA, 481 bp, Cricetulus griseus; identical to SEQ ID NO: 2157
  misc_feature (31)..(46): n is a, c, g, or t
  misc_feature (83)..(101): n is a, c, g, or t

SEQ ID NO: 5800 - DNA, 580 bp, Cricetulus griseus; identical to SEQ ID NO: 2158

SEQ ID NO: 5801 - DNA, 160 bp, Cricetulus griseus
agtgtgcctttgagagccctcggtcatattaacttcagtcatttggctggcctcgctcgtgtgagagttctgggcactgctctgcttctttctgcacagagcttcctgttcatcttcccccacgccacgcagcagagagcattcattgtcatgcctgttt

SEQ ID NO: 5802 - DNA, 523 bp, Cricetulus griseus; identical to SEQ ID NO: 2160

SEQ ID NO: 5803 - DNA, 520 bp, Cricetulus griseus; identical to SEQ ID NO: 2161

SEQ ID NO: 5804 - DNA, 384 bp, Cricetulus griseus; identical to SEQ ID NO: 2162

SEQ ID NO: 5805 - DNA, 416 bp, Cricetulus griseus
cttgtacattctaggtcagcctgttctacattgtaagtttgagaccagccaagactacatagtgagagtctgtctctaaaaaccaaaacaaataaaaccccacaaagacaactactactaatgcatataacacttaaaaaattttagatgcattgtgctaaatacaagaagtcactacatattctacgattctatttgagtaaactcaggaaaaggcgagacttagggcagaaaacatgttgggtagttgaaggagaagggtttaccagaggagcattggggacttagaggaggggcaatctgattgttctatttcttgattactatgattatataagtgcttatttaaaacacacaggatcacaataccacataacacctgacattctctcctggcctctgtacacctccatgca

SEQ ID NO: 5806 - DNA, 568 bp, Cricetulus griseus; identical to SEQ ID NO: 2164
  misc_feature (363)..(377): n is a, c, g, or t

SEQ ID NO: 5807 - DNA, 550 bp, Cricetulus griseus
cacttggcagatgctgagggttgggaaggcaaaagcagacgtgtggcccaaaactgctccaaagaaaggtgagagccgggcagggaacaggtgagttaggagcagccctttcaataacagttctagacttttcacttttgtttttagatgagaacagcttggttcctccggcccctgtggacagcgatggggagagtgataactctgaccgtgttcctgtgcccagtttccagaattccttcagccaagctattgaagcagccttcatgaaattggacacaccagctacttcagatgccctctctggtaagagcggggaactcactcagcactgggctcaggctcagccatatatgccactgttcctgtcagtattggtagcagtagtaatgactcaggctcttagccactggaccatctgtccagcctacacttaagagttggttgagggtgatgggcaatgttaacctcagtgcctgagacacctgtgctccttaggcagggatggggtagcagtgaaattccaaagcctgcactcactcagctgtga

SEQ ID NO: 5808 - DNA, 579 bp, Cricetulus griseus; identical to SEQ ID NO: 2166
  misc_feature (314)..(332): n is a, c, g, or t
  misc_feature (442)..(456): n is a, c, g, or t
  misc_feature (481)..(496): n is a, c, g, or t

SEQ ID NO: 5809 - DNA, 579 bp, Cricetulus griseus; identical to SEQ ID NO: 2167

SEQ ID NO: 5810 - DNA, 568 bp, Cricetulus griseus
tttctgcgccccagtccgcggaatgacccgctcgcggctcgccgcctcggccgcccacgacccctagacaccgacacccgccctaggatcaaaccactggcgcagaccggtcccgccacgccgagcctgtggtccgttctaagggcggctcgcctgaggatttgtagatactgagtcgaagttggggctaatccacatcatggaaatggaaaccactgaacctgagccagactgtgtagtacagcctccctctcctcctgacgacttttcatgccaaatgagaatctctgagaagatcagtccattgaaaacttggtttaagaaaaaacaggatcagaaacgattgggaactggaaccctgaggtctttgagaccaatattaaatactttgctagaatctggctcgcttgatggagtttttagagctagagaccaaaatgcagatgagagcagcttacatgaacgtatggtgaaaaaacccctggaactcaacccatcatgttcaccagcagaaaacagtatgtctgtcctgattcctgatgagacaaatgttgagggccagttacca

SEQ ID NO: 5811 - DNA, 338 bp, Cricetulus griseus; identical to SEQ ID NO: 2169

SEQ ID NO: 5812 - DNA, 528 bp, Cricetulus griseus; identical to SEQ ID NO: 2170

SEQ ID NO: 5813 - DNA, 467 bp, Cricetulus griseus; identical to SEQ ID NO: 2171
  misc_feature (98)..(122): n is a, c, g, or t
  misc_feature (199)..(219): n is a, c, g, or t

SEQ ID NO: 5814 - DNA, 421 bp, Cricetulus griseus; identical to SEQ ID NO: 2172

SEQ ID NO: 5815 - DNA, 510 bp, Cricetulus griseus; identical to SEQ ID NO: 2173

SEQ ID NO: 5816 - DNA, 461 bp, Cricetulus griseus; identical to SEQ ID NO: 2174
  misc_feature (106)..(135): n is a, c, g, or t
  misc_feature (141)..(159): n is a, c, g, or t
  misc_feature (161)..(174): n is a, c, g, or t

SEQ ID NO: 5817 - DNA, 461 bp, Cricetulus griseus
  misc_feature (288)..(301): n is a, c, g, or t
  misc_feature (303)..(321): n is a, c, g, or t
  misc_feature (327)..(356): n is a, c, g, or t
ttactgtccttgctgtgtaaaccaagctggcctttaactcaaagagatctgctgcctcttcctcctgagtgctaggattaaaggtatgagttatggggggaggaaggggcccaatgacacaagaactcaggacccacatgctcatatgcccttatctcctaggttctaggactaaaggaatgcaaaaccacatctggataggtctttattttattttattttttttttggtttttcaagacagggtttctctgtgtagctttggagcctatcctggaactcgttctgnnnnnnnnnnnnnntnnnnnnnnnnnnnnnnnnncctgannnnnnnnnnnnnnnnnnnnnnnnnnnnnnatgtgccaccaatgcccggcttagatctttaatttttgaacattgtagctcaggctggcttggagcttacgctgtagcccaggctggctttgagctcactctgta

SEQ ID NO: 5818 - DNA, 505 bp, Cricetulus griseus; identical to SEQ ID NO: 2176

SEQ ID NO: 5819 - DNA, 523 bp, Cricetulus griseus; identical to SEQ ID NO: 2177

SEQ ID NO: 5820 - DNA, 459 bp, Cricetulus griseus; identical to SEQ ID NO: 2178

SEQ ID NO: 5821 - DNA, 580 bp, Cricetulus griseus; identical to SEQ ID NO: 2179

SEQ ID NO: 5822 - DNA, 510 bp, Cricetulus griseus; identical to SEQ ID NO: 2180

SEQ ID NO: 5823 - DNA, 520 bp, Cricetulus griseus
  misc_feature (28)..(80): n is a, c, g, or t
  misc_feature (88)..(144): n is a, c, g, or t
  misc_feature (147)..(159): n is a, c, g, or t
  misc_feature (189)..(228): n is a, c, g, or t
  misc_feature (250)..(275): n is a, c, g, or t
  misc_feature (288)..(372): n is a, c, g, or t
tccgactacaacatccagaaggagtctnnnnnnnnnnnnnnnnnnnnnnnnnnnnnnnnnnnnnnnnnnnnnnnnnnnnncctgacannnnnnnnnnnnnnnnnnnnnnnnnnnnnnnnnnnnnnnnnnnnnnnnnnnnnnnnnaannnnnnnnnnnnngagggcattccccctgaccagcagaggtcnnnnnnnnnnnnnnnnnnnnnnnnnnnnnnnnnnnnnnnntccgactacaacatccagaagnnnnnnnnnnnnnnnnnnnnnnnnnnactgatgggtggnnnnnnnnnnnnnnnnnnnnnnnnnnnnnnnnnnnnnnnnnnnnnnnnnnnnnnnnnnnnnnnnnnnnnnnnnnnnnnnnnnnnnaagatccaagacaaggatggcattccccctgaaaacagacgtgcatctttgcccgcaatcagctggaagatggcggcaccctgtccgactacaacatccagaaggagtccaccctgcacctggttctacgcctcatgggtgggatgca

SEQ ID NO: 5824 - DNA, 519 bp, Cricetulus griseus; identical to SEQ ID NO: 2182

SEQ ID NO: 5825 - DNA, 578 bp, Cricetulus griseus; identical to SEQ ID NO: 2183

SEQ ID NO: 5826 - DNA, 475 bp, Cricetulus griseus
acaaaagtggttgagagagagtacctgggagaattgggagaagctctagagaggaaatgggaggaagaaagcgatggaattctattttaattaagactgcattaggcctaaaacattttttccttagatttaaatgtctaagatctgggaacatatctgtaacagagaactttcccagcatgtgcaaagttctggctttgattcccaataccaccaatgtgggatatttaaatatctaaattatgaacaagtggagagaatcataataaactgttatgtaaattaaaggctcaaatgttcctatgttctcattctgaaggtaactgtttaggaactagatagtgatgcatgccaataatcctgacacttgagcaactaaggcaatcacatatttaatcccagtttgggttatatatctgtatttaaaaaaaaaaagttttggccaggcagtggtggtgcatgcctctaatcccaa

SEQ ID NO: 5827 - DNA, 536 bp, Cricetulus griseus; identical to SEQ ID NO: 2185
  misc_feature (108)..(125): n is a, c, g, or t

SEQ ID NO: 5828 - DNA, 492 bp, Cricetulus griseus; identical to SEQ ID NO: 2186

SEQ ID NO: 5829 - DNA, 568 bp, Cricetulus griseus; identical to SEQ ID NO: 2187

SEQ ID NO: 5830 - DNA, 484 bp, Cricetulus griseus
tcaaaatgaacaaagtgagtagaaagaaggtagctgatgatttgcataaggctcaacagtcactgaactttatccactcaaaaattgcactaaaagctgctggagacaatgctgttattgggaatagtagtgtttccccagaaacgggagctcctgagaaagagacaatgtctgtgagtctgaatcagactgtggtccagttacagcaactgcttcaggaagtcaatcagcaactcatgaaggagaagtgatcctggctgtgggagtgaagtcattggaaattactcgaaggcgttgtattatattttgccaaatgaaagccttatttatgtttcaccctttctactttgtcacacactgaacagttttgtcttttctaaccttgttagactactgacttacagagaaaacacttaaaaagccaactctgtagacacctccagagtttagttttataataaactgtttgaattaatagacctga

SEQ ID NO: 5831 - DNA, 449 bp, Cricetulus griseus; identical to SEQ ID NO: 2189

SEQ ID NO: 5832 - DNA, 579 bp, Cricetulus griseus; identical to SEQ ID NO: 2190
  misc_feature (532)..(547): n is a, c, g, or t

SEQ ID NO: 5833 - DNA, 548 bp, Cricetulus griseus
  misc_feature (269)..(283): n is a, c, g, or t
cagtatgtcaaggcggcctcttacctgctttccatccacaaagtgtatgaagctgtggaacttctcaagtcaaatcatttctacagagaagctattgcagttgccaaggctcggctgcgccctgatgaccccgttctgaatgacctggacctgagctggggttccatcctggagagagatggccactacgctattgcagccaagtgctacttaggagccacttccgcctatgatgcagccaaagttctggccagaaaaggagatgcagnnnnnnnnnnnnnnnctgcagagctggcttccatagcaggagaaagtgagctggctgcttccctggctctcagatgtgcccaggagctgcttctggtgaagaactgggtgggcgcacaggaagccttgcggcttcatgaaagcttgcagggccagagactggtcttctgcctccttgagcttctgtgccggcacttagaggaaaagcagcctccagaggtcagaagcccctcctccgtttaccaccagtgggccacaagctctgaaggaaccttggtgca

SEQ ID NO: 5834 - DNA, 576 bp, Cricetulus griseus
  misc_feature (488)..(488): n is a, c, g, or t
agtaggggctgcttcttccactcagcaattttggggaggcctgagctgtgctgtccttctgagcctttgtctcttgagggcctttgttcatcctggccgctcagcagctctaagtacacacacgcacacgcacgcacgcatgtgtacacacatgtatgcatgcatgcacgcacacacactcacaaaccaaccagaggtctaggaaaggacagccacttcctgtaggcttcagctctgcatacagatgacaggagtagaaatacaggccaagttccctacggtgacctcaggttggcctcagagctcatgtgtcagttcctaacccatctttgtttataaacaccagaatttctgcctcacccgtaggcagtttattagtgagtagagccagttaagaaccactttcaatacctggaaactttctaaaagtctttggtaatgtgagaagcaactaacagaagagcagggcataacttccttttggcctncgtttgccagtcactccctctccatttgcctacgtcctgctcatcagctcatatctgatactgcaggcagcttactgtttcctttcta

SEQ ID NO: 5835 - DNA, 474 bp, Cricetulus griseus; identical to SEQ ID NO: 2193

SEQ ID NO: 5836 - DNA, 525 bp, Cricetulus griseus; identical to SEQ ID NO: 2194

SEQ ID NO: 5837 - DNA, 491 bp, Cricetulus griseus; identical to SEQ ID NO: 2195
  misc_feature (149)..(168): n is a, c, g, or t

SEQ ID NO: 5838 - DNA, 525 bp, Cricetulus griseus; identical to SEQ ID NO: 2196
  misc_feature (42)..(42): n is a, c, g, or t

SEQ ID NO: 5839 - DNA, 441 bp, Cricetulus griseus; identical to SEQ ID NO: 2197
  misc_feature (355)..(410): n is a, c, g, or t

SEQ ID NO: 5840 - DNA, 438 bp, Cricetulus griseus; identical to SEQ ID NO: 2198
  misc_feature (254)..(279): n is a, c, g, or t

SEQ ID NO: 5841 - DNA, 523 bp, Cricetulus griseus; identical to SEQ ID NO: 2199

SEQ ID NO: 5842 - DNA, 438 bp, Cricetulus griseus; identical to SEQ ID NO: 2200

SEQ ID NO: 5843 - DNA, 422 bp, Cricetulus griseus
  misc_feature (83)..(83): n is a, c, g, or t
tggcatgattgaagaaataattcataggcagcagggaaccccatccatcaacattcttaagtcaagaaagggacttagctttnctagggtaggctctctataagagtacctggtcaatgtcagcgcaatggcgtttatcctttgaaagaccatgtttatggtagacttaagtggcattcagtatcatggtatccagtagctataaattttctccaatattttttcagacacatggtactacaaactcaaatgttttgcccttatctggtacatcagattcatggatcagataatctgttcaccccaaagggtagagatatcatgcccaataatataaaacttatccttggttcctcaaagattatagtgaaatattttcaggctaatgtagagtataggtggcaatacttggagtaaacctt

SEQ ID NO: 5844 - DNA, 250 bp, Cricetulus griseus; identical to SEQ ID NO: 2202

SEQ ID NO: 5845 - DNA, 404 bp, Cricetulus griseus; identical to SEQ ID NO: 2203

SEQ ID NO: 5846 - DNA, 107 bp, Cricetulus griseus; identical to SEQ ID NO: 2204

SEQ ID NO: 5847 - DNA, 579 bp, Cricetulus griseus; identical to SEQ ID NO: 2205

SEQ ID NO: 5848 - DNA, 568 bp, Cricetulus griseus; identical to SEQ ID NO: 2206

SEQ ID NO: 5849 - DNA, 429 bp, Cricetulus griseus; identical to SEQ ID NO: 2207
  misc_feature (371)..(385): n is a, c, g, or t

SEQ ID NO: 5850 - DNA, 429 bp, Cricetulus griseus
  misc_feature (45)..(59): n is a, c, g, or t
atctcccttcagtatttcatccacgccttgtcctagcaccatgtnnnnnnnnnnnnnnncagagacttttgttgtgatgagagaagcactggatggtgtggtcagtcacctgtctgtccttacagcaccatagacttgtactgggctatgctgcttgaagcagagatggaattaatgaagcacagttggataatcattctttcgtattactcaagaccagcacctgtccctcctccccttggtctaagacattaagaagaaaagatagaatttgtttttatagggtcttttgttgttttgttttcctctggtgcttgagatgagagcaggaccttatgtgtgctaagcacctgctctgcaatgagttgctacccagccatatctagtatgtgactcgcagattgtcactaaagttgcaaaagtcatcat

SEQ ID NO: 5851 - DNA, 432 bp, Cricetulus griseus
  misc_feature (40)..(79): n is a, c, g, or t
  misc_feature (104)..(160): n is a, c, g, or t
  misc_feature (185)..(225): n is a, c, g, or t
  misc_feature (227)..(261): n is a, c, g, or t
  misc_feature (267)..(373): n is a, c, g, or t
tgggccacctgatgatgaggcggccatgggcattaaaagnnnnnnnnnnnnnnnnnnnnnnnnnnnnnnnnnnnnnnnnatggtgccaacctccgacaaaggcnnnnnnnnnnnnnnnnnnnnnnnnnnnnnnnnnnnnnnnnnnnnnnnnnnnnnnnnnccgcatcatgggccccaactacacnnnnnnnnnnnnnnnnnnnnnnnnnnnnnnnnnnnnnnnnngnnnnnnnnnnnnnnnnnnnnnnnnnnnnnnnnnnnttgagnnnnnnnnnnnnnnnnnnnnnnnnnnnnnnnnnnnnnnnnnnnnnnnnnnnnnnnnnnnnnnnnnnnnnnnnnnnnnnnnnnnnnnnnnnnnnnnnnnnnnnnnnnncttcatcgtcagccctgtcgtcatattggctgcggaggccaataacccagctgacctgc

SEQ ID NO: 5852 - DNA, 551 bp, Cricetulus griseus; identical to SEQ ID NO: 2210

SEQ ID NO: 5853 - DNA, 524 bp, Cricetulus griseus; identical to SEQ ID NO: 2211

SEQ ID NO: 5854 - DNA, 416 bp, Cricetulus griseus; identical to SEQ ID NO: 2212

SEQ ID NO: 5855 - DNA, 572 bp, Cricetulus griseus; identical to SEQ ID NO: 2213

SEQ ID NO: 5856 - DNA, 510 bp, Cricetulus griseus; identical to SEQ ID NO: 2214

SEQ ID NO: 5857 - DNA, 579 bp, Cricetulus griseus; identical to SEQ ID NO: 2215
  misc_feature (143)..(182): n is a, c, g, or t

SEQ ID NO: 5858 - DNA, 541 bp, Cricetulus griseus
ctcctccaagataagcagcgcgaaaatctactgcgtggcttgtcaggagctcgactcagatgtggataaagacaatccggctctgaatccacaagcggccctctctcaagctcgggaacaccagctcgcctccacgacagagcctgccacaggctctcgtcccacaccccatcccccagtaccccgtccagagcactgtgagggagctgcagcagggctcaaggcagcccatgggcctcccctacctgctgcacctctaaatacagatgtggtggcttacacacagacagccctcctgcagaagctaacctgggcttcagctgagctgggctctaccacctccttggagactagtattcatctgtgtgggcttatccgggcttgtgctgaggccctgtgcagcctgaagcagcttcagctctgagacctctactccaacctgtgttcccctgagaaaaaccctctagaaaaacagctgttcctctgtgcggcttgttcctttcttggttctgagagcatgcaagcccccgctctatacatg

SEQ ID NO: 5859 - DNA, 581 bp, Cricetulus griseus; identical to SEQ ID NO: 2217

SEQ ID NO: 5860 - DNA, 578 bp, Cricetulus griseus; identical to SEQ ID NO: 2218

SEQ ID NO: 5861 - DNA, 579 bp, Cricetulus griseus; identical to SEQ ID NO: 2219

SEQ ID NO: 5862 - DNA, 578 bp, Cricetulus griseus; identical to SEQ ID NO: 2220
  misc_feature (409)..(409): n is a, c, g, or t

SEQ ID NO: 5863 - DNA, 529 bp, Cricetulus griseus; identical to SEQ ID NO: 2221

SEQ ID NO: 5864 - DNA, 580 bp, Cricetulus griseus; identical to SEQ ID NO: 2222
  misc_feature (264)..(280): n is a, c, g, or t

SEQ ID NO: 5865 - DNA, 579 bp, Cricetulus griseus; identical to SEQ ID NO: 2223
  misc_feature (487)..(487): n is a, c, g, or t

SEQ ID NO: 5866 - DNA, 580 bp, Cricetulus griseus; identical to SEQ ID NO: 2224
  misc_feature (500)..(530): n is a, c, g, or t

SEQ ID NO: 5867 - DNA, 581 bp, Cricetulus griseus; identical to SEQ ID NO: 2225

SEQ ID NO: 5868 - DNA, 568 bp, Cricetulus griseus; identical to SEQ ID NO: 2226
  misc_feature (154)..(189): n is a, c, g, or t
  misc_feature (483)..(483): n is a, c, g, or t

SEQ ID NO: 5869 - DNA, 578 bp, Cricetulus griseus; identical to SEQ ID NO: 2227

SEQ ID NO: 5870 - DNA, 579 bp, Cricetulus griseus; identical to SEQ ID NO: 2228

SEQ ID NO: 5871 - DNA, 567 bp, Cricetulus griseus; identical to SEQ ID NO: 2229

SEQ ID NO: 5872 - DNA, 581 bp, Cricetulus griseus; identical to SEQ ID NO: 2230

SEQ ID NO: 5873 - DNA, 84 bp, Cricetulus griseus; identical to SEQ ID NO: 2231

SEQ ID NO: 5874 - DNA, 579 bp, Cricetulus griseus; identical to SEQ ID NO: 2232

SEQ ID NO: 5875 - DNA, 600 bp, Cricetulus griseus; identical to SEQ ID NO: 2233
  misc_feature (30)..(30): n is a, c, g, or t
  misc_feature (38)..(38): n is a, c, g, or t
  misc_feature (46)..(46): n is a, c, g, or t
  misc_feature (51)..(51): n is a, c, g, or t
  misc_feature (56)..(80): n is a, c, g, or t
  misc_feature (83)..(103): n is a, c, g, or t

SEQ ID NO: 5876 - DNA, 579 bp, Cricetulus griseus; identical to SEQ ID NO: 2234

SEQ ID NO: 5877 - DNA, 503 bp, Cricetulus griseus; identical to SEQ ID NO: 2235
  misc_feature (359)..(378): n is a, c, g, or t

SEQ ID NO: 5878 - DNA, 555 bp, Cricetulus griseus; identical to SEQ ID NO: 2236

SEQ ID NO: 5879 - DNA, 485 bp, Cricetulus griseus; identical to SEQ ID NO: 2237

SEQ ID NO: 5880 - DNA, 246 bp, Cricetulus griseus; identical to SEQ ID NO: 2238

SEQ ID NO: 5881 - DNA, 567 bp, Cricetulus griseus; identical to SEQ ID NO: 2239

SEQ ID NO: 5882 - DNA, 377 bp, Cricetulus griseus; identical to SEQ ID NO: 2240

SEQ ID NO: 5883 - DNA, 395 bp, Cricetulus griseus; identical to SEQ ID NO: 2241

SEQ ID NO: 5884 - DNA, 395 bp, Cricetulus griseus
cattttattgattaataataattgatagggaagggtcgtattctgtgggggaggactttattccccatgggtggggccatccatgggctgatggtcctgggtgctataaaaaagcaggcttagcaagccaggaaacaagtgttcttccacagtgtatgcatcagttcctgcctataggtttctaattccagttcctgccccagtttccttttgttaaagcactgtgatgcagaagtataagacacaatcacccctttcctcctcaaactgcttttggtcatggcatttttgtgcaataaattgtctacaattatataagacaagtatatacacacgcgaagtatacacatatcacacacatgtatacacagtacagacacacaaaagcatacaca

SEQ ID NO: 5885 - DNA, 578 bp, Cricetulus griseus; identical to SEQ ID NO: 2243

SEQ ID NO: 5886 - DNA, 570 bp, Cricetulus griseus; identical to SEQ ID NO: 2244

SEQ ID NO: 5887 - DNA, 579 bp, Cricetulus griseus; identical to SEQ ID NO: 2245
  misc_feature (57)..(100): n is a, c, g, or t
  misc_feature (508)..(522): n is a, c, g, or t
  misc_feature (554)..(554): n is a, c, g, or t

SEQ ID NO: 5888 - DNA, 600 bp, Cricetulus griseus; identical to SEQ ID NO: 2246
  misc_feature (30)..(73): n is a, c, g, or t

SEQ ID NO: 5889 - DNA, 104 bp, Cricetulus griseus
  misc_feature (44)..(68): n is a, c, g, or t
accaagcatgtccttactggctcagctgataacacctgtccgcnnnnnnnnnnnnnnnnnnnnnnnnncactggccctacggaaaaccaactaacccgtccaaa

SEQ ID NO: 5890 - DNA, 483 bp, Cricetulus griseus
tggacgccgagatggagttcaactgcgagatgaacaagagaactgggcaacccatgatccacatctatctggataaggagacaggaaagcctaaaggtgatgcaacagtgtcctatgaagatgcacgaactgccaaggctgctgtggaatggtttgatggaaaagattttcaaggaagcaaacttaaagtttctcttgcccgaaagaagcctccaatgaacagcatgcggggtggcatgccacctcgagagggcagagggatgccaccaccacttcgtggaggtcctggtggcccatgtggtcctggaggacccatgggacgcatgggaggccgtggatgagacagaggaggcttccccccacggggaccccgaggctcccgagggaacccctctggaggaggaaatgtccagcaccgatctggagactggcagtgtcccaatccgggctgcggaaaccagatctccgcctggagaacagaat

SEQ ID NO: 5891 - DNA, 432 bp, Cricetulus griseus; identical to SEQ ID NO: 2249

SEQ ID NO: 5892 - DNA, 449 bp, Cricetulus griseus
aagacgagcagacaagaaaactggccattttggcagagcagtatgaacagagtataaatgagatgatggcttctcaggcgttacggctagacgaggcgcaggaggcagagtgccaggccttgagactacagctgcagcaggagatggagctgctcaacgcctaccagagcaaaatcaagatgcagacagaggcccagcacgagcgcgagctgcagaagctagagcagagggtgtctctgcgcagagcgcatcttgagcagaagattgaagaggagcttgccgccctgcagaaggaacgcagcgagagaatcaagattctcctggaaagacaagagcgagagacggagacttttgacatggagagcctcagaatgggatttgggaatttggtgacattagattttcctaaggaggactatagatgagattaaatttttttgccatttaca

SEQ ID NO: 5893 - DNA, 523 bp, Cricetulus griseus
cccctcgagggtgcgacccacggcgtgccggaaaaaaaaaaagccaggggattcatgtttgggtatgttataaggggagggacttcatcagatgtggacgatttctatctatatccaactctgcaggttggagttagcataaaacttggaaaaatctactggggctttctttcctgactgtgggtcattttctttggggttctcccttttctgatcaccggttctaaacagctttgccacttttgtgtcccaaggcaataaataggaaacaaaactttgtaaaggggaacaagaaaagttacctgttaccctatcaaagtccactgtctcgggtgacactaacgaggacatggggaaggggacactggagtgtgttatcttggggtgctgatgcaggtgcagggtctcaaatatacaaccaggtggtatttctcaaaagttggccacttggttctgaatcctatcctcttaatttctgcaggaaagttaaagttacatggtgttgcattttgttctgggtggg

SEQ ID NO: 5894 - DNA, 545 bp, Cricetulus griseus
  misc_feature (37)..(61): n is a, c, g, or t
  misc_feature (140)..(168): n is a, c, g, or t
  misc_feature (438)..(450): n is a, c, g, or t
  misc_feature (452)..(464): n is a, c, g, or t
  misc_feature (474)..(505): n is a, c, g, or t
taggttaagagcactgcttgttcttccaaaggtcctnnnnnnnnnnnnnnnnnnnnnnnnngtggctcacagccatctggaatgagatctggtgccctcctctggcctgtaggcaacatgcaggcagaacactgtacacnnnnnnnnnnnnnnnnnnnnnnnnnnnnncttaaaaaaataaaataaaaccagctactttttttccaggtgtgatggtatacactcaagtctgctgaggcaggattgttgtaggttctaggtcaagcttcactacagtacccttgtctcacatcccctccttcagtgaaagaaagaaaatacctcttaatcttgttatggaaaagtcagatcttcagcttgcttcatcacttgactataagagatgttttaacttcagaggaataatactccaacaaagctgggcgttggtggcgcatnnnnnnnnnnnnnannnnnnnnnnnnnaaggcatgcnnnnnnnnnnnnnnnnnnnnnnnnnnnnnnnnccagaacgagtgccaagataggctccaaagctatacagag

SEQ ID NO: 5895 - DNA, 532 bp, Cricetulus griseus; identical to SEQ ID NO: 2253

SEQ ID NO: 5896 - DNA, 521 bp, Cricetulus griseus; identical to SEQ ID NO: 2254
  misc_feature (39)..(53): n is a, c, g, or t

SEQ ID NO: 5897 - DNA, 214 bp, Cricetulus griseus; identical to SEQ ID NO: 2255
  misc_feature (157)..(157): n is a, c, g, or t
  misc_feature (172)..(172): n is a, c, g, or t

SEQ ID NO: 5898 - DNA, 386 bp, Cricetulus griseus; identical to SEQ ID NO: 2256

SEQ ID NO: 5899 - DNA, 580 bp, Cricetulus griseus; identical to SEQ ID NO: 2257

SEQ ID NO: 5900 - DNA, 180 bp, Cricetulus griseus
  misc_feature (63)..(78): n is a, c, g, or t
  misc_feature (80)..(94): n is a, c, g, or t
  misc_feature (109)..(128): n is a, c, g, or t
attattttccttattcttattctattgaccttacctgtaataataactgtatttaacttctannnnnnnnnnnnnnnngnnnnnnnnnnnnnnncaacaattgagctgnnnnnnnnnnnnnnnnnnnncgcactatgcactttagtggagggtaacactgaattgctaattactaattgg

SEQ ID NO: 5901 - DNA, 580 bp, Cricetulus griseus; identical to SEQ ID NO: 2259

SEQ ID NO: 5902 - DNA, 581 bp, Cricetulus griseus; identical to SEQ ID NO: 2260

SEQ ID NO: 5903 - DNA, 578 bp, Cricetulus griseus; identical to SEQ ID NO: 2261
  misc_feature (507)..(507): n is a, c, g, or t

SEQ ID NO: 5904 - DNA, 505 bp, Cricetulus griseus; identical to SEQ ID NO: 2262

SEQ ID NO: 5905 - DNA, 568 bp, Cricetulus griseus
agctacctgcggcgcgggagtcctcagctctgggtgcgtggcatccacagccggccggagcagcaccaccagctttcataggaggagcaaggcctctggggctgacggaggtggccctcggctgctgtccattgcgggcactcgaccgtcggtgcggaatggacagctgctggtgtcaaccgggctcccagccctggaccagctcttaagtggaggtttagctgttggaacagttcttctgattgaagaagataaatacagtatttattcacctttgctcttcaagtatttcctggcagaaggaattgtcaatgggcatactctgttggttgcatctgccaaagaaaagcctgccgacattttacaggaactccctgcaccactacttgatgacaatggtaaaaaagagcttgaagatgttcataattctaaaacaccagaatcagatgttaacatgaaaatagcctggcgataccagttgcaacccaagatgcaagttgggccagtgtcatcttcacgatttggtcactattatgatgtatcaaaaaggattcctcaggagctacta

SEQ ID NO: 5906 - DNA, 505 bp, Cricetulus griseus; identical to SEQ ID NO: 2264
  misc_feature (32)..(47): n is a, c, g, or t

SEQ ID NO: 5907 - DNA, 523 bp, Cricetulus griseus; identical to SEQ ID NO: 2265
  misc_feature (139)..(153): n is a, c, g, or t

SEQ ID NO: 5908 - DNA, 579 bp, Cricetulus griseus; identical to SEQ ID NO: 2266

SEQ ID NO: 5909 - DNA, 570 bp, Cricetulus griseus; identical to SEQ ID NO: 2267

SEQ ID NO: 5910 - DNA, 515 bp, Cricetulus griseus; identical to SEQ ID NO: 2268

SEQ ID NO: 5911 - DNA, 436 bp, Cricetulus griseus; identical to SEQ ID NO: 2269
  misc_feature (234)..(290): n is a, c, g, or t

SEQ ID NO: 5912 - DNA, 555 bp, Cricetulus griseus
  misc_feature (145)..(159): n is a, c, g, or t
ttacattttgaaattttaaaacagccaaacttaggtgtcctgctgtcctcagggtcccaagggaagggaccctgggcaggtctagcaccaagtccaccccactattagctttacgtggactcgcaatgggcagcaagcagtagtnnnnnnnnnnnnnnnacctgcctccagcaataaacttctaaatatctatctctacctccatcaaaataactatggtgagaattaagaggaggaggaaatcagccatacaggagatgcccctctgctgagtgtccaaggacaaaaaaaccaggccactagggaaaggtgtccagatggtaggaacagagtcattaagatgggtggcctgatacacagatttcagatcaataatgacacaagggtaggctaatgtaacctacattagaaggtgtgctgttgtactgagtagacagacccactgattccccaaaccgatttggctctttccacttgccagatatcagggtgggttccctgccttccgcagtacgtcatttagtacttttcagttggttgttttaatgcttcttc

SEQ ID NO: 5913 - DNA, 164 bp, Cricetulus griseus
ctggtaatgagccacggcctgtgggaacctttttctctctgtgaactaaaatctttcaattgtcacagggttgttttgctatcctaggtctgtatacataataattaaatctttttttaaaatgaaggaatatacacacactgagtaataacaaaaataaacaa

SEQ ID NO: 5914 - DNA, 179 bp, Cricetulus griseus; identical to SEQ ID NO: 2272

SEQ ID NO: 5915 - DNA, 574 bp, Cricetulus griseus; identical to SEQ ID NO: 2273

SEQ ID NO: 5916 - DNA, 566 bp, Cricetulus griseus; identical to SEQ ID NO: 2274

SEQ ID NO: 5917 - DNA, 455 bp, Cricetulus griseus; identical to SEQ ID NO: 2275

SEQ ID NO: 5918 - DNA, 564 bp, Cricetulus griseus; identical to SEQ ID NO: 2276

SEQ ID NO: 5919 - DNA, 467 bp, Cricetulus griseus; identical to SEQ ID NO: 2277

SEQ ID NO: 5920 - DNA, 121 bp, Cricetulus griseus; identical to SEQ ID NO: 2278

SEQ ID NO: 5921 - DNA, 121 bp, Cricetulus griseus
atgtattcatgcttatgctgcagcccaatcacccagtatccgctctggggctgatacctggagtaggcactctgcttgcctggatactggctgtctccggtttttagataggacaagattt

SEQ ID NO: 5922 - DNA, 567 bp, Cricetulus griseus; identical to SEQ ID NO: 2280

SEQ ID NO: 5923 - DNA, 545 bp, Cricetulus griseus; identical to SEQ ID NO: 2281
  misc_feature (85)..(129): n is a, c, g, or t

SEQ ID NO: 5924 - DNA, 483 bp, Cricetulus griseus; identical to SEQ ID NO: 2282

SEQ ID NO: 5925 - DNA, 441 bp, Cricetulus griseus; identical to SEQ ID NO: 2283

SEQ ID NO: 5926 - DNA, 246 bp, Cricetulus griseus; identical to SEQ ID NO: 2284

SEQ ID NO: 5927 - DNA, 472 bp, Cricetulus griseus; identical to SEQ ID NO: 2285

SEQ ID NO: 5928 - DNA, 92 bp, Cricetulus griseus; identical to SEQ ID NO: 2286

SEQ ID NO: 5929 - DNA, 455 bp, Cricetulus griseus; identical to SEQ ID NO: 2287

SEQ ID NO: 5930 - DNA, 573 bp, Cricetulus griseus; identical to SEQ ID NO: 2288
  misc_feature (217)..(245): n is a, c, g, or t

SEQ ID NO: 5931 - DNA, 432 bp, Cricetulus griseus; identical to SEQ ID NO: 2289
  misc_feature (205)..(219): n is a, c, g, or t

SEQ ID NO: 5932 - DNA, 114 bp, Cricetulus griseus
caaagcttttttgggaaaaacctacctttgggtgcccgggaacttattttgaaaaccaggcgggccttaacctgaaaaattgcccggcctttgccttttaaaggcggaaataaa

SEQ ID NO: 5933 - DNA, 580 bp, Cricetulus griseus; identical to SEQ ID NO: 2291

SEQ ID NO: 5934 - DNA, 397 bp, Cricetulus griseus
accactttgcacctgccattatgtacagtcataactgtaattagtcaaataaacaaaaacagacccaaaagcaaaagttaaaataacaaacaagtcagtatcacccccctcccacggccagccgtctgccggtctgtccatctatctgtcttcttggagaagtgtctctttagaatgttttttgggttgtttattcttttgctgttgctttgagctaaaaagagtcacttctgggcgttcactcctcgtgaggtgtacacattcctccccttttccgaggcgtctctgcctctgtccctcatccctctgttttatggcttggtgtaatcccatgcatctgtgctttttgtcccctgcactgtctaaaacatcctcacacagacagtatcatgttgcg

SEQ ID NO: 5935 - DNA, 530 bp, Cricetulus griseus; identical to SEQ ID NO: 2293

SEQ ID NO: 5936 - DNA, 500 bp, Cricetulus griseus; identical to SEQ ID NO: 2294
  misc_feature (214)..(214): n is a, c, g, or t
  misc_feature (232)..(254): n is a, c, g, or t

SEQ ID NO: 5937 - DNA, 578 bp, Cricetulus griseus; identical to SEQ ID NO: 2295

SEQ ID NO: 5938 - DNA, 541 bp, Cricetulus griseus; identical to SEQ ID NO: 2296

SEQ ID NO: 5939 - DNA, 513 bp, Cricetulus griseus; identical to SEQ ID NO: 2297
  misc_feature (68)..(105): n is a, c, g, or t
  misc_feature (219)..(236): n is a, c, g, or t

SEQ ID NO: 5940 - DNA, 564 bp, Cricetulus griseus; identical to SEQ ID NO: 2298
  misc_feature (458)..(458): n is a, c, g, or t

SEQ ID NO: 5941 - DNA, 496 bp, Cricetulus griseus
aggagaaaagaaatatggggctggaaagagatttactatttatagtaacaacctgcacggtctagcacaaaaacagacccacagaccaatgatataaatccgcacaggtacaattacccaatttttgacaaatatatcaaaaatataaattggaaaaaaagctataccaaataatggttggaaaactagctgagattttgtagaagaatggaacagatcagactcttttaccctacacaaaaataaattcaaaatggctcaaagtcctgtaacgtcaaaattgacagaataaaatatgggtaagggccagtaatatggctcagtggaaaaagggcacctgttaataagcccggagacttaagattgatccctggaattcaggtatggaaagggagaagtgattcccactagttgtgtttagatctctacatgagtgctatgacacatatgaccacacacccaccaaatagtatacttaaaaaaaaaaaaattctca

SEQ ID NO: 5942 - DNA, 555 bp, Cricetulus griseus; identical to SEQ ID NO: 2300

SEQ ID NO: 5943 - DNA, 342 bp, Cricetulus griseus; identical to SEQ ID NO: 2301

SEQ ID NO: 5944 - DNA, 483 bp, Cricetulus griseus; identical to SEQ ID NO: 2302

SEQ ID NO: 5945 - DNA, 483 bp, Cricetulus griseus
gccaggctagttggtcagcagaccccagggaaccacctgcatggccccagaactacaattacagtgtgcagcaccataccaggcttcttaaagagggtgttagaataatacacaggtctttacgcatgcaaagcaggtactttacccactaaaacatctcctcatgatcccagtgcctcaccaactctctctctgtaatgatttatggctgttttgccttaatgtgtgtgtctaccatatgcaccacgtgtgagcctgatgcctgctggaggtcaaaagagggcatcatatcctttggcagtggagtcacagatagctgtgagccaccatgtgggtgctgggaactgaacttgagtcatctgcagagcagcaagtgctcttaactgctgaaccatctctctggccccagaaaagccgtttcaaagatgggatgcttaagcagatccttgaagaatgagtatggatcaatcaaagagtgtaggt

SEQ ID NO: 5946 - DNA, 553 bp, Cricetulus griseus; identical to SEQ ID NO: 2304

SEQ ID NO: 5947 - DNA, 523 bp, Cricetulus griseus; identical to SEQ ID NO: 2305
  misc_feature (421)..(442): n is a, c, g, or t

SEQ ID NO: 5948 - DNA, 536 bp, Cricetulus griseus; identical to SEQ ID NO: 2306
  misc_feature (152)..(168): n is a, c, g, or t

SEQ ID NO: 5949 - DNA, 498 bp, Cricetulus griseus; identical to SEQ ID NO: 2307

SEQ ID NO: 5950 - DNA, 578 bp, Cricetulus griseus; identical to SEQ ID NO: 2308

SEQ ID NO: 5951 - DNA, 580 bp, Cricetulus griseus; identical to SEQ ID NO: 2309
  misc_feature (84)..(103): n is a, c, g, or t

SEQ ID NO: 5952 - DNA, 553 bp, Cricetulus griseus; identical to SEQ ID NO: 2310

SEQ ID NO: 5953 - DNA, 333 bp, Cricetulus griseus; identical to SEQ ID NO: 2311

SEQ ID NO: 5954 - DNA, 544 bp, Cricetulus griseus; identical to SEQ ID NO: 2312

SEQ ID NO: 5955 - DNA, 600 bp, Cricetulus griseus; identical to SEQ ID NO: 2313

SEQ ID NO: 5956 - DNA, 538 bp, Cricetulus griseus; identical to SEQ ID NO: 2314

SEQ ID NO: 5957 - DNA, 536 bp, Cricetulus griseus; identical to SEQ ID NO: 2315

SEQ ID NO: 5958 - DNA, 514 bp, Cricetulus griseus; identical to SEQ ID NO: 2316
  misc_feature (110)..(132): n is a, c, g, or t

SEQ ID NO: 5959 - DNA, 426 bp, Cricetulus griseus; identical to SEQ ID NO: 2317
  misc_feature (342)..(366): n is a, c, g, or t

SEQ ID NO: 5960 - DNA, 116 bp, Cricetulus griseus
atatttgcacacttcttacgtactgacaaagaatgtgataaaaatagcaaacacttggtaatgaccacatgctaggcacttccttagtgttttaatccttaaagctacttgtacca

SEQ ID NO: 5961 - DNA, 403 bp, Cricetulus griseus; identical to SEQ ID NO: 2319

SEQ ID NO: 5962 - DNA, 412 bp, Cricetulus griseus
gtaatgcccgggaaactcctctggggggacatcatggagctcgaggcacccttggaagagtccgagagccagaagaaggagaggcaaaaggtgcgctgcggctgggccgcgcctccctcgggctgcgctggcctgggcggggaggggagcggtccctgaaggggacgacctgtcagtaccgggcgcgagcttcccagggaaggcttcccctcgccttgctcggccctctgaggtcccggagaccgtccccgtcgccactctcccggacctggaggaggacggaccaaggcttgagcccggcatccgtggcacttcagcccgacgtcggcctctgcgcctggatccctcccaagagatgggcagactcgagctcccgtcgccgcggaatctgctcgttctccctttgctcggc

SEQ ID NO: 5963 - DNA, 372 bp, Cricetulus griseus; identical to SEQ ID NO: 2321

SEQ ID NO: 5964 - DNA, 569 bp, Cricetulus griseus; identical to SEQ ID NO: 2322
  misc_feature (523)..(537): n is a, c, g, or t

SEQ ID NO: 5965 - DNA, 515 bp, Cricetulus griseus; identical to SEQ ID NO: 2323

SEQ ID NO: 5966 - DNA, 542 bp, Cricetulus griseus; identical to SEQ ID NO: 2324

SEQ ID NO: 5967 - DNA, 579 bp, Cricetulus griseus; identical to SEQ ID NO: 2325

SEQ ID NO: 5968 - DNA, 503 bp, Cricetulus griseus; identical to SEQ ID NO: 2326
  misc_feature (49)..(67): n is a, c, g, or t

SEQ ID NO: 5969 - DNA, 497 bp, Cricetulus griseus; identical to SEQ ID NO: 2327

SEQ ID NO: 5970 - DNA, 252 bp, Cricetulus griseus; identical to SEQ ID NO: 2328

SEQ ID NO: 5971 - DNA, 553 bp, Cricetulus griseus; identical to SEQ ID NO: 2329

SEQ ID NO: 5972 - DNA, 580 bp, Cricetulus griseus; identical to SEQ ID NO: 2330
  misc_feature (459)..(478): n is a, c, g, or t

SEQ ID NO: 5973 - DNA, 537 bp, Cricetulus griseus; identical to SEQ ID NO: 2331
  misc_feature (181)..(197): n is a, c, g, or t

SEQ ID NO: 5974 - DNA, 78 bp, Cricetulus griseus; identical to SEQ ID NO: 2332

SEQ ID NO: 5975 - DNA, 557 bp, Cricetulus griseus; identical to SEQ ID NO: 2333

SEQ ID NO: 5976 - DNA, 546 bp, Cricetulus griseus; identical to SEQ ID NO: 2334
  misc_feature (407)..(425): n is a, c, g, or t

SEQ ID NO: 5977 - DNA, 84 bp, Cricetulus griseus
tttcatttcactgttggtgaaagcaagaaggcatctgccaaagtttcagatgggatttctactcagtacccagttgtggatcat

SEQ ID NO: 5978 - DNA, 580 bp, Cricetulus griseus; identical to SEQ ID NO: 2336

SEQ ID NO: 5979 - DNA, 133 bp, Cricetulus griseus
atggacatggatctcctcattgatctgaacaaagcaaatgaagaagagttggaacgctaggatgaagacctggatgatgcacagaagaatccgggaaagagtgaaattcaaaatgcaatgatggcaaaagcgg

SEQ ID NO: 5980 - DNA, 231 bp, Cricetulus griseus; identical to SEQ ID NO: 2338

SEQ ID NO: 5981 - DNA, 544 bp, Cricetulus griseus; identical to SEQ ID NO: 2339

SEQ ID NO: 5982 - DNA, 434 bp, Cricetulus griseus; identical to SEQ ID NO: 2340
  misc_feature (38)..(60): n is a, c, g, or t

SEQ ID NO: 5983 - DNA, 512 bp, Cricetulus griseus; identical to SEQ ID NO: 2341

SEQ ID NO: 5984 - DNA, 513 bp, Cricetulus griseus; identical to SEQ ID NO: 2342

SEQ ID NO: 5985 - DNA, 544 bp, Cricetulus griseus; identical to SEQ ID NO: 2343

SEQ ID NO: 5986 - DNA, 255 bp, Cricetulus griseus
  misc_feature (232)..(253): n is a, c, g, or t
caaggcctttttgggtgatccatttgcatttgggggtgctggtcctgggggtgctgccccccctggtggtcctggtgccgctgcagccccagggaagggtgaaaccaaggaaaagtcggaggaatcaaatgaggatatgggatttggtttgtttgactgatccctcagagcaacctaatcagccagttttattttagaaatatggaaataaagaataaagtttttcttttgnnnnnnnnnnnnnnnnnnnnnngg

SEQ ID NO: 5987 - DNA, 385 bp, Cricetulus griseus; identical to SEQ ID NO: 2345

SEQ ID NO: 5988 - DNA, 497 bp, Cricetulus griseus; identical to SEQ ID NO: 2346

SEQ ID NO: 5989 - DNA, 454 bp, Cricetulus griseus; identical to SEQ ID NO: 2347

SEQ ID NO: 5990 - DNA, 514 bp, Cricetulus griseus
gatccctttactgttcatatggcagcaagaattattgccaagttagcagcttgggggaaagaattgatggaaggcagtgacttaaattactattttaattggattaaaactcagctgagttcacagaaacttcgtggtagcggtgttgctgttgaaacaggaacaatctcttcaagtgatagttctcagtatgtgcagtgtgttgctggctgtctgcaactgatgctccgggtcaatgagtaccgttttgcctgggtggaagcagatggggtgaactgtataatgggcgttttgagtaacaagtgtggctttcaactccaatatcaaatgattttttcaatatggctcctggcatttagtcctcaaatgtgtgaacaccttcgccgctacaatatcattcctgttctctcagacatccttcaagaatctgtcaaagaaaaagtaacaagaatcattcttgcagcattccgtaatttcctagaaaaatcaactgaaagagaaactcgccaagaat

SEQ ID NO: 5991 - DNA, 579 bp, Cricetulus griseus; identical to SEQ ID NO: 2349
  misc_feature (181)..(195): n is a, c, g, or t

SEQ ID NO: 5992 - DNA, 528 bp, Cricetulus griseus; identical to SEQ ID NO: 2350

SEQ ID NO: 5993 - DNA, 496 bp, Cricetulus griseus; identical to SEQ ID NO: 2351

SEQ ID NO: 5994 - DNA, 536 bp, Cricetulus griseus; identical to SEQ ID NO: 2352

SEQ ID NO: 5995 - DNA, 560 bp, Cricetulus griseus; identical to SEQ ID NO: 2353
  misc_feature (291)..(308): n is a, c, g, or t

SEQ ID NO: 5996 - DNA, 396 bp, Cricetulus griseus; identical to SEQ ID NO: 2354

SEQ ID NO: 5997 - DNA, 485 bp, Cricetulus griseus; identical to SEQ ID NO: 2355

SEQ ID NO: 5998 - DNA, 579 bp, Cricetulus griseus; identical to SEQ ID NO: 2356

SEQ ID NO: 5999 - DNA, 520 bp, Cricetulus griseus; identical to SEQ ID NO: 2357
  misc_feature (180)..(207): n is a, c, g, or t

SEQ ID NO: 6000 - DNA, 423 bp, Cricetulus griseus; identical to SEQ ID NO: 2358

SEQ ID NO: 6001 - DNA, 438 bp, Cricetulus griseus; identical to SEQ ID NO: 2359

SEQ ID NO: 6002 - DNA, 195 bp, Cricetulus griseus; identical to SEQ ID NO: 2360

SEQ ID NO: 6003 - DNA, 164 bp, Cricetulus griseus; identical to SEQ ID NO: 2361

SEQ ID NO: 6004 - DNA, 551 bp, Cricetulus griseus; identical to SEQ ID NO: 2362

SEQ ID NO: 6005 - DNA, 557 bp, Cricetulus griseus; identical to SEQ ID NO: 2363

SEQ ID NO: 6006 - DNA, 590 bp, Cricetulus griseus; identical to SEQ ID NO: 2364

SEQ ID NO: 6007 - DNA, 431 bp, Cricetulus griseus; identical to SEQ ID NO: 2365

SEQ ID NO: 6008 - DNA, 494 bp, Cricetulus griseus; identical to SEQ ID NO: 2366

SEQ ID NO: 6009 - DNA, 389 bp, Cricetulus griseus; identical to SEQ ID NO: 2367

SEQ ID NO: 6010 - DNA, 479 bp, Cricetulus griseus; identical to SEQ ID NO: 2368
  misc_feature (406)..(406): n is a, c, g, or t

SEQ ID NO: 6011 - DNA, 561 bp, Cricetulus griseus; identical to SEQ ID NO: 2369
  misc_feature (32)..(73): n is a, c, g, or t

SEQ ID NO: 6012 - DNA, 535 bp, Cricetulus griseus; identical to SEQ ID NO: 2370

SEQ ID NO: 6013 - DNA, 474 bp, Cricetulus griseus; identical to SEQ ID NO: 2371

SEQ ID NO: 6014 - DNA, 581 bp, Cricetulus griseus; identical to SEQ ID NO: 2372
  misc_feature (421)..(421): n is a, c, g, or t
  misc_feature (515)..(515): n is a, c, g, or t

SEQ ID NO: 6015 - DNA, 525 bp, Cricetulus griseus; identical to SEQ ID NO: 2373

SEQ ID NO: 6016 - DNA, 392 bp, Cricetulus griseus; identical to SEQ ID NO: 2374

SEQ ID NO: 6017 - DNA, 230 bp, Cricetulus griseus; identical to SEQ ID NO: 2375

SEQ ID NO: 6018 - DNA, 566 bp, Cricetulus griseus; identical to SEQ ID NO: 2376

SEQ ID NO: 6019 - DNA, 487 bp, Cricetulus griseus; identical to SEQ ID NO: 2377
  misc_feature (218)..(218): n is a, c, g, or t

SEQ ID NO: 6020 - DNA, 503 bp, Cricetulus griseus; identical to SEQ ID NO: 2378
  misc_feature (347)..(347): n is a, c, g, or t

SEQ ID NO: 6021 - DNA, 564 bp, Cricetulus griseus; identical to SEQ ID NO: 2379

SEQ ID NO: 6022 - DNA, 146 bp, Cricetulus griseus; identical to SEQ ID NO: 2380
  misc_feature (90)..(90): n is a, c, g, or t

SEQ ID NO: 6023 - DNA, 484 bp, Cricetulus griseus; identical to SEQ ID NO: 2381
  misc_feature (362)..(390): n is a, c, g, or t

SEQ ID NO: 6024 - DNA, 260 bp, Cricetulus griseus; identical to SEQ ID NO: 2382

SEQ ID NO: 6025 - DNA, 419 bp, Cricetulus griseus; identical to SEQ ID NO: 2383

SEQ ID NO: 6026 - DNA, 431 bp, Cricetulus griseus; identical to SEQ ID NO: 2384

SEQ ID NO: 6027 - DNA, 579 bp, Cricetulus griseus; identical to SEQ ID NO: 2385

SEQ ID NO: 6028 - DNA, 479 bp, Cricetulus griseus; identical to SEQ ID NO: 2386
  misc_feature (296)..(310): n is a, c, g, or t

SEQ ID NO: 6029 - DNA, 114 bp, Cricetulus griseus; identical to SEQ ID NO: 2387

SEQ ID NO: 6030 - DNA, 356 bp, Cricetulus griseus; identical to SEQ ID NO: 2388

SEQ ID NO: 6031 - DNA, 490 bp, Cricetulus griseus; identical to SEQ ID NO: 2389
  misc_feature (58)..(75): n is a, c, g, or t

SEQ ID NO: 6032 - DNA, 490 bp, Cricetulus griseus
  misc_feature (416)..(433): n is a, c, g, or t
catttcttttttatcatgtggtaggacatgttgtctgaatgtatgtacatgtttgtttggtatctaccaatgacagaagagggtgtaactaggattactgacagttgggagataccatgtggattcagcgaatcaaacccaggtcttctggaagactagccagtgctgttaactgcagagacatcccaactcctctttgttggtggtggtgatgatcactttggttttggttttggtttctatttttgtttttattttctgagacagggtttctctgtgtagccctagctgtcctggaactcatgagatagaccatgctggcctcaaactcagagatcctctcgcctctgccttttaagtgcttgaactaaaggcacagctgacatgccaaatcttaaggcatgctgaatctttcnnnnnnnnnnnnnnnnnncctgaagtttagtgatctacatgatcagtatggaaggtgtcataaaagaatacattt

SEQ ID NO: 6033 - DNA, 435 bp, Cricetulus griseus
tataggctatcttcctcactcaccctccacttcagttgttcaaactgagtctcttactgaacccaaagctcatccacttggctagactagctggccatcaagtccctaggattcctgtctcagtctcccagcactggattacaggcttttcacatggtactcagttccttatgcttcacaacaatcattttaccaatagccatctgcccagcttccagctccattactggaagaaacttaaagcatagaattctgggtccctgcataaaaattaaaactatctactccaagtcagacatgtggccctgtgtctataatctcaactactcagcagtctaaagcaagaagatggagggaacatttgaggccagccgagagctacatacacacacaggctctacctccaaaataaataaataaataagactgctctag

SEQ ID NO: 6034 - DNA, 513 bp, Cricetulus griseus; identical to SEQ ID NO: 2392

SEQ ID NO: 6035 - DNA, 531 bp, Cricetulus griseus; identical to SEQ ID NO: 2393

SEQ ID NO: 6036 - DNA, 436 bp, Cricetulus griseus; identical to SEQ ID NO: 2394

SEQ ID NO: 6037 - DNA, 509 bp, Cricetulus griseus; identical to SEQ ID NO: 2395

SEQ ID NO: 6038 - DNA, 352 bp, Cricetulus griseus; identical to SEQ ID NO: 2396

SEQ ID NO: 6039 - DNA, 546 bp, Cricetulus griseus; identical to SEQ ID NO: 2397
  misc_feature (219)..(233): n is a, c, g, or t

SEQ ID NO: 6040 - DNA, 372 bp, Cricetulus griseus; identical to SEQ ID NO: 2398

SEQ ID NO: 6041 - DNA, 353 bp, Cricetulus griseus; identical to SEQ ID NO: 2399
  misc_feature (31)..(48): n is a, c, g, or t
  misc_feature (187)..(209): n is a, c, g, or t

SEQ ID NO: 6042 - DNA, 579 bp, Cricetulus griseus; identical to SEQ ID NO: 2400

SEQ ID NO: 6043 - DNA, 395 bp, Cricetulus griseus; identical to SEQ ID NO: 2401

SEQ ID NO: 6044 - DNA, 507 bp, Cricetulus griseus; identical to SEQ ID NO: 2402

SEQ ID NO: 6045 - DNA, 550 bp, Cricetulus griseus; identical to SEQ ID NO: 2403
  misc_feature (54)..(72): n is a, c, g, or t

SEQ ID NO: 6046 - DNA, 510 bp, Cricetulus griseus; identical to SEQ ID NO: 2404
  misc_feature (40)..(58): n is a, c, g, or t
  misc_feature (92)..(109): n is a, c, g, or t

SEQ ID NO: 6047 - DNA, 461 bp, Cricetulus griseus; identical to SEQ ID NO: 2405

SEQ ID NO: 6048 - DNA, 411 bp, Cricetulus griseus
tgtgctaaaaaaaaaactactgaaagaaatgagggcaaaataatcggaaggaattttatgttcatggactagaaaaataatatagtaaaaatgtctttatcacccaaagctacacactaatcctatccaaataccagcgatgcggatggagacagggctcagtggttaggaggacttttgctcttgtagaggacccaggttcaattccaagcactgaatggtggctcacaaccatttgtaactctagttccaaggggtctgatgccttctgccctctgaggatgctagacacacgtcgtacacatataggcagaatactcacataaatacatctgaaaaccattaaaaccataaatgattttctttacagataaagaaaaatagtcataaaactcatagggaacctcaacc

SEQ ID NO: 6049 - DNA, 429 bp, Cricetulus griseus; identical to SEQ ID NO: 2407

SEQ ID NO: 6050 - DNA, 359 bp, Cricetulus griseus; identical to SEQ ID NO: 2408

SEQ ID NO: 6051 - DNA, 445 bp, Cricetulus griseus; identical to SEQ ID NO: 2409

SEQ ID NO: 6052 - DNA, 527 bp, Cricetulus griseus; identical to SEQ ID NO: 2410

SEQ ID NO: 6053 - DNA, 80 bp, Cricetulus griseus; identical to SEQ ID NO: 2411

SEQ ID NO: 6054 - DNA, 531 bp, Cricetulus griseus; identical to SEQ ID NO: 2412
  misc_feature (316)..(316): n is a, c, g, or t

SEQ ID NO: 6055 - DNA, 215 bp, Cricetulus griseus
tttctgcctcagcccaggctctgtcctttgtgttcaccagattcctggagaggcctggctttcctgctgacctgacacatgtacctagggcacacatgctcattggtactgagggactgtggtgagctgcattcctaggggtaggtggcagggaaaggctggcttcagcggtagcaggtaccatttcctggcctgacaacatctgaggcctgaca

SEQ ID NO: 6056 - DNA, 523 bp, Cricetulus griseus; identical to SEQ ID NO: 2414
  misc_feature (370)..(389): n is a, c, g, or t

SEQ ID NO: 6057 - DNA, 532 bp, Cricetulus griseus; identical to SEQ ID NO: 2415

SEQ ID NO: 6058 - DNA, 480 bp, Cricetulus griseus; identical to SEQ ID NO: 2416
  misc_feature (269)..(294): n is a, c, g, or t

SEQ ID NO: 6059 - DNA, 579 bp, Cricetulus griseus; identical to SEQ ID NO: 2417
  misc_feature (178)..(178): n is a, c, g, or t

SEQ ID NO: 6060 - DNA, 379 bp, Cricetulus griseus
gagtaggagggccgctgcggtgagccttgaagcttagggcgcgggcccgggtggagccgccgcaggtgcagatcttggtggtagtagcaaatattcaaacgagaactttgaaggccgaagtggagaagggttccatgtgaacagcagttgaacatgggtcagtcggtcctgagagatgggcgagcgccgttccgaagggacgggcgatggcctccgttgccctcggccgatcgaaagggagtcgggttcagatccccgaatccggagtggcggagatgggcgccgtgaggcgtccagtgcggtaacgcgaccgatcccggagaagccggcgggagccccggggagagttctcttttctttgtaaggaacagggcagtcc

SEQ ID NO: 6061 - DNA, 405 bp, Cricetulus griseus; identical to SEQ ID NO: 2419

SEQ ID NO: 6062 - DNA, 378 bp, Cricetulus griseus; identical to SEQ ID NO: 2420

SEQ ID NO: 6063 - DNA, 578 bp, Cricetulus griseus; identical to SEQ ID NO: 2421

SEQ ID NO: 6064 - DNA, 540 bp, Cricetulus griseus; identical to SEQ ID NO: 2422

SEQ ID NO: 6065 - DNA, 566 bp, Cricetulus griseus; identical to SEQ ID NO: 2423

SEQ ID NO: 6066 - DNA, 479 bp, Cricetulus griseus; identical to SEQ ID NO: 2424
  misc_feature (257)..(276): n is a, c, g, or t

SEQ ID NO: 6067 - DNA, 558 bp, Cricetulus griseus
aaagtggcccagacggacggtgccaatgtggacatgcacctgaagcagattgaaatcaagaagttcaagtacgggattgaagagcacggcaaggtgaagatgagggggggcctgctgagaacctacatcatcagtatcctctttaagtctgtcttcgaggtggccttcctactcattcagtggtacatctacggcttcagcctgagtgccgtctacacctgcaaaagagatccctgcccccatcaggtggactgcttcctctcgcggcccacagagaaaaccatcttcatcatcttcatgttggtggtgtccttggtgtctctcgctttgaacatcattgagctcttctatgtcttcttcaagggcgttaaggatcgcgtgaagggaaggagcgatccttaccacgccaccaccggcccactgagcccctcaaaagactgtggctctccaaaatatgcctacttcaatggctgctcgtcaccaacagctcccctctcgcctatgtctcctcccgggtacaagctggttaccggtgacagaaacaattcctcctgccgc

SEQ ID NO: 6068 - DNA, 484 bp, Cricetulus griseus; identical to SEQ ID NO: 2426

SEQ ID NO: 6069 - DNA, 147 bp, Cricetulus griseus; identical to SEQ ID NO: 2427

SEQ ID NO: 6070 - DNA, 147 bp, Cricetulus griseus
acagcccacaggttgggaaccactaaattatacattccttccttcaaaggaataaccctgtgtgtttagctttccaggctccccttgtgcttttactgtgagtaccaaggcctttgtgcctcctacatagcctaatataaccatatg

SEQ ID NO: 6071 - DNA, 283 bp, Cricetulus griseus; identical to SEQ ID NO: 2429

SEQ ID NO: 6072 - DNA, 120 bp, Cricetulus griseus; identical to SEQ ID NO: 2430

SEQ ID NO: 6073 - DNA, 541 bp, Cricetulus griseus
  misc_feature (371)..(371): n is a, c, g, or t
gatcatcctaaaggcaactccgttccccaaggatgggtccttcccccgatccccagcaacgacatctgggcaacagccgttaagcttcattaagaccctccaggagtgtggtccagcaggccagcactgcagctctagatgtcagtgatgctgccgtctcacgctgtagtcttctgcacaacttaaacttcatgcggcattgctgtagctggaagtcctgcttctctctattctctgccctggccagagttacctcttgaatcaagaggttgataaagttcttctggaaagggcctagatgaactgaagttattagcatgggcagtggccttcactcactaactgcctctgttttgagaggcttggcctantgtggcctacttatctgttctaagcttgttttgaattggcgggtaaatacagtcagcacacttggttactccttgaagatgttcacggagtagagttagcaggcactactccttattttcctctaccaactgccctccagcttccaggtcaaagtttgacctacagttct

SEQ ID NO: 6074 - DNA, 576 bp, Cricetulus griseus; identical to SEQ ID NO: 2432

SEQ ID NO: 6075 - DNA, 522 bp, Cricetulus griseus; identical to SEQ ID NO: 2433

SEQ ID NO: 6076 - DNA, 211 bp, Cricetulus griseus; identical to SEQ ID NO: 2434

SEQ ID NO: 6077 - DNA, 250 bp, Cricetulus griseus; identical to SEQ ID NO: 2435

SEQ ID NO: 6078 - DNA, 578 bp, Cricetulus griseus; identical to SEQ ID NO: 2436

SEQ ID NO: 6079 - DNA, 580 bp, Cricetulus griseus; identical to SEQ ID NO: 2437
  misc_feature (525)..(525): n is a, c, g, or t
  misc_feature (552)..(552): n is a, c, g, or t

SEQ ID NO: 6080 - DNA, 438 bp, Cricetulus griseus; identical to SEQ ID NO: 2438

SEQ ID NO: 6081 - DNA, 380 bp, Cricetulus griseus; identical to SEQ ID NO: 2439

SEQ ID NO: 6082 - DNA, 177 bp, Cricetulus griseus; identical to SEQ ID NO: 2440

SEQ ID NO: 6083 - DNA, 151 bp, Cricetulus griseus; identical to SEQ ID NO: 2441

SEQ ID NO: 6084 - DNA, 523 bp, Cricetulus griseus; identical to SEQ ID NO: 2442

SEQ ID NO: 6085 - DNA, 514 bp, Cricetulus griseus; identical to SEQ ID NO: 2443

SEQ ID NO: 6086 - DNA, 398 bp, Cricetulus griseus; identical to SEQ ID NO: 2444

SEQ ID NO: 6087 - DNA, 293 bp, Cricetulus griseus
tgcactttgagtctcctggaattcctggggactacctcatcactgccccctgcccttgcttctataagctaactcatgcaagaatacagtgttgaatattcaatgcccagagtctcaaaagttgcctggctttctctgtttaccagagtgggcagtgggacagaagaagttttgagttcctcatctataaatggatagtaagactgcccaatttctacggagtcagtttttatcctgtgaaaaattggaaggctgtgtggaacgcattgcatccctgctatggactaatttgc

SEQ ID NO: 6088 - DNA, 329 bp, Cricetulus griseus; identical to SEQ ID NO: 2446
  misc_feature (116)..(137): n is a, c, g, or t

SEQ ID NO: 6089 - DNA, 418 bp, Cricetulus griseus; identical to SEQ ID NO: 2447

SEQ ID NO: 6090 - DNA, 569 bp, Cricetulus griseus; identical to SEQ ID NO: 2448

SEQ ID NO: 6091 - DNA, 563 bp, Cricetulus griseus; identical to SEQ ID NO: 2449

SEQ ID NO: 6092 - DNA, 454 bp, Cricetulus griseus; identical to SEQ ID NO: 2450

SEQ ID NO: 6093 - DNA, 233 bp, Cricetulus griseus; identical to SEQ ID NO: 2451
  misc_feature (126)..(141): n is a, c, g, or t
  misc_feature (143)..(159): n is a, c, g, or t

SEQ ID NO: 6094 - DNA, 554 bp, Cricetulus griseus; identical to SEQ ID NO: 2452

SEQ ID NO: 6095 - DNA, 153 bp, Cricetulus griseus; identical to SEQ ID NO: 2453

SEQ ID NO: 6096 - DNA, 105 bp, Cricetulus griseus; identical to SEQ ID NO: 2454

SEQ ID NO: 6097 - DNA, 509 bp, Cricetulus griseus; identical to SEQ ID NO: 2455
  misc_feature (192)..(251): n is a, c, g, or t
  misc_feature (479)..(479): n is a, c, g, or t

SEQ ID NO: 6098 - DNA, 463 bp, Cricetulus griseus; identical to SEQ ID NO: 2456

SEQ ID NO: 6099 - DNA, 501 bp, Cricetulus griseus; identical to SEQ ID NO: 2457

SEQ ID NO: 6100 - DNA, 450 bp, Cricetulus griseus; identical to SEQ ID NO: 2458

SEQ ID NO: 6101 - DNA, 561 bp, Cricetulus griseus
gcgatgctgatctttttgattcccatgacgacagagatgacgatggggaggcagggtcggtggaggagcacaagagtgttatcatgcacctcttatcacaagttaggctcggaatggatcttacaaaggtagttcttccgacgtttattcttgagagaagatctcttttagaaatgtatgcagacttcttcgcacatccggacctgtttgtgagcattagcgaccagaaggatcccagggatcgaatggttcaggttgtgaaatggtatctctcagccttccatgcaggaaggagaggatcagtagccaaaaagccgtacaatcctattttgggtgagatctttcagtgtcactggacattgccaaatgatactgaagagaacacagaacttgtttcagaaggaccggttccgtgggtttctaagaacagtgtaacatttgtggctgagcaagtttcccatcatccacccatttcagccttttacgctgagtgttttaacaagaagatacaattcaatgctcatatctggactaaatcaaaattccttgggatgtctattg

SEQ ID NO: 6102 - DNA, 90 bp, Cricetulus griseus
cctttgtgtgttagtgtgtatgagctgtgaatgtgatactccgacactaagactccagacacaaatgtagaaacacttgaactgctcgtg

SEQ ID NO: 6103 - DNA, 430 bp, Cricetulus griseus; identical to SEQ ID NO: 2461
  misc_feature (131)..(174): n is a, c, g, or t
  misc_feature (238)..(273): n is a, c, g, or t

SEQ ID NO: 6104 - DNA, 296 bp, Cricetulus griseus; identical to SEQ ID NO: 2462

SEQ ID NO: 6105 - DNA, 578 bp, Cricetulus griseus; identical to SEQ ID NO: 2463
  misc_feature (102)..(102): n is a, c, g, or t
  misc_feature (387)..(403): n is a, c, g, or t
  misc_feature (497)..(512): n is a, c, g, or t

SEQ ID NO: 6106 - DNA, 428 bp, Cricetulus griseus; identical to SEQ ID NO: 2464

SEQ ID NO: 6107 - DNA, 490 bp, Cricetulus griseus; identical to SEQ ID NO: 2465

SEQ ID NO: 6108 - DNA, 494 bp, Cricetulus griseus; identical to SEQ ID NO: 2466

SEQ ID NO: 6109 - DNA, 146 bp, Cricetulus griseus
gtgagcgataaggaacactcccggcagatcaatgacatccagctatctagagacatgaccatgtttgtcaccgcgtccaaggacaacacagataagctctttgactccacgagtcttgaacatcagaagactttccgaacagaacg

SEQ ID NO: 6110 - DNA, 119 bp, Cricetulus griseus; identical to SEQ ID NO: 2468

SEQ ID NO: 6111 - DNA, 538 bp, Cricetulus griseus; identical to SEQ ID NO: 2469

SEQ ID NO: 6112 - DNA, 490 bp, Cricetulus griseus; identical to SEQ ID NO: 2470

SEQ ID NO: 6113 - DNA, 146 bp, Cricetulus griseus; identical to SEQ ID NO: 2471

SEQ ID NO: 6114 - DNA, 146 bp, Cricetulus griseus
tgtttacactatattcccttcatttcaaagggtcaccaatgatattggcactcccccccccgacagtgtcttcacactgggacccagagacctgagcgcccgggggctccacacacagatgtgcccactgtgtataacacagagtg

SEQ ID NO: 6115 - DNA, 577 bp, Cricetulus griseus; identical to SEQ ID NO: 2473
  misc_feature (522)..(522): n is a, c, g, or t

SEQ ID NO: 6116 - DNA, 432 bp, Cricetulus griseus; identical to SEQ ID NO: 2474

SEQ ID NO: 6117 - DNA, 312 bp, Cricetulus griseus; identical to SEQ ID NO: 2475

SEQ ID NO: 6118 - DNA, 579 bp, Cricetulus griseus; identical to SEQ ID NO: 2476

SEQ ID NO: 6119 - DNA, 537 bp, Cricetulus griseus; identical to SEQ ID NO: 2477
  misc_feature (144)..(163): n is a, c, g, or t

SEQ ID NO: 6120 - DNA, 564 bp, Cricetulus griseus; identical to SEQ ID NO: 2478

SEQ ID NO: 6121 - DNA, 360 bp, Cricetulus griseus; identical to SEQ ID NO: 2479

SEQ ID NO: 6122 - DNA, 587 bp, Cricetulus griseus; identical to SEQ ID NO: 2480
  misc_feature (514)..(514): n is a, c, g, or t

SEQ ID NO: 6123 - DNA, 580 bp, Cricetulus griseus; identical to SEQ ID NO: 2481

SEQ ID NO: 6124 - DNA, 508 bp, Cricetulus griseus; identical to SEQ ID NO: 2482

SEQ ID NO: 6125 - DNA, 535 bp, Cricetulus griseus; identical to SEQ ID NO: 2483
  misc_feature (74)..(146): n is a, c, g, or t

SEQ ID NO: 6126 - DNA, 568 bp, Cricetulus griseus; identical to SEQ ID NO: 2484
  misc_feature (368)..(386): n is a, c, g, or t
  misc_feature (524)..(524): n is a, c, g, or t

SEQ ID NO: 6127 - DNA, 334 bp, Cricetulus griseus; identical to SEQ ID NO: 2485

SEQ ID NO: 6128 - DNA, 557 bp, Cricetulus griseus; identical to SEQ ID NO: 2486

SEQ ID NO: 6129 - DNA, 579 bp, Cricetulus griseus; identical to SEQ ID NO: 2487
  misc_feature (550)..(550): n is a, c, g, or t

SEQ ID NO: 6130 - DNA, 507 bp, Cricetulus griseus
tgggtgacgagtggaagtgtcatgtggtccccatcagtggcaggaatgacaaacaaggttttcccatgaagcaaggcgatttggcccatggcagagtgcgcctgctgtggagtaaggggcattcttgctataggccaaggagaaaggggtaaacctgcatagggtccaatttggccccctaaatgtgggtgacagtagtgtggcttgggcagtctgtgtggccgctggcagtgggaccaggatttatccctagtgcttgaactggctttgtggggccaattctctttggtgggataccgtgctcaacctagatatggggggagggccttggtcctcaaagtgattcgacagacttccttgatttcccatgggcggcctcaacctctacggtggcgggaggcggcgctgacggtggctgcgctttttcctgcggcttctccccccggcctcttccgcgtctcgctcctccatcgcgacggcggcggactcggcagctccgcttttatc

SEQ ID NO: 6131 - DNA, 570 bp, Cricetulus griseus; identical to SEQ ID NO: 2489

SEQ ID NO: 6132 - DNA, 423 bp, Cricetulus griseus; identical to SEQ ID NO: 2490

SEQ ID NO: 6133 - DNA, 583 bp, Cricetulus griseus; identical to SEQ ID NO: 2491

SEQ ID NO: 6134 - DNA, 438 bp, Cricetulus griseus; identical to SEQ ID NO: 2492

SEQ ID NO: 6135 - DNA, 155 bp, Cricetulus griseus
tggaagatgccggcggtgatggccggctgacagaatggtggagatggcccgtgggtcgggccaggaaaggaggacgcccgctccggtggtgacccgcccaggtgtttactagattacctgagggagagggtgggatggggcgggggctggggggt

SEQ ID NO: 6136 - DNA, 577 bp, Cricetulus griseus; identical to SEQ ID NO: 2494

SEQ ID NO: 6137 - DNA, 428 bp, Cricetulus griseus; identical to SEQ ID NO: 2495

SEQ ID NO: 6138 - DNA, 422 bp, Cricetulus griseus; identical to SEQ ID NO: 2496

SEQ ID NO: 6139 - DNA, 512 bp, Cricetulus griseus; identical to SEQ ID NO: 2497

SEQ ID NO: 6140 - DNA, 486 bp, Cricetulus griseus; identical to SEQ ID NO: 2498

SEQ ID NO: 6141 - DNA, 580 bp, Cricetulus griseus; identical to SEQ ID NO: 2499
  misc_feature (282)..(300): n is a, c, g, or t

SEQ ID NO: 6142 - DNA, 552 bp, Cricetulus griseus; identical to SEQ ID NO: 2500
  misc_feature (457)..(457): n is a, c, g, or t

SEQ ID NO: 6143 - DNA, 577 bp, Cricetulus griseus; identical to SEQ ID NO: 2501

SEQ ID NO: 6144 - DNA, 513 bp, Cricetulus griseus; identical to SEQ ID NO: 2502

SEQ ID NO: 6145 - DNA, 373 bp, Cricetulus griseus
  misc_feature (176)..(202): n is a, c, g, or t
agacagagagaaacgggaggtgggcagggcccttttaaaagggaacatagtgaatatgcacaggtggtgctcttagtggctgcaactgagggcgtatcctgtcagaatcccaaggacaggcaagtatagatgcccaaatactaacattttgcccaagacagtgccgagtgcatcannnnnnnnnnnnnnnnnnnnnnnnnnntcattgtttgaaaagaagggacagagttgtataagccatacatttgtgtttgtctattaatcagcataaaagttatattgctgtaacaaatagaccaatattcccaatgtttaatacaacattttatatttctcacataagctgcaatgatagcatgggtctgcttgttga

SEQ ID NO: 6146 - DNA, 467 bp, Cricetulus griseus; identical to SEQ ID NO: 2504
  misc_feature (94)..(94): n is a, c, g, or t

SEQ ID NO: 6147 - DNA, 523 bp, Cricetulus griseus; identical to SEQ ID NO: 2505
  misc_feature (228)..(247): n is a, c, g, or t

SEQ ID NO: 6148 - DNA, 579 bp, Cricetulus griseus; identical to SEQ ID NO: 2506

SEQ ID NO: 6149 - DNA, 579 bp, Cricetulus griseus
gacactcaaatgacagaaatacaaagtaagtagatgaaaaccaatcagcatacccttcaaggttccttcttatctttcaagctcttgtagtaactagatttacaagaaagagctttcttgagaaagggtctctctatatcagtggttctcaacatgaggttccctaccctttggggtcaaggaatcctttcacagtagtcgcctaagaccactggaaaacaaagatatttgtattacaattcataacagcagcaaaattacagtaatgaagtagcaataattttatggttgggagtcaccaaaacatgaagaactgtatgtaataaagggtcccagaattacaaaggttgagaaacaatgctctacatagtccaggcttgtgagtaaactggccttgaactcaagagatccacctacctctgtctctgaagtgctaggattaaaggcatgcgccacacacacgtaggccctcctgagaaagcttatggttcccaaatgttcacaggcctgtgttccccaaacccattttaggaattattttcataagcaacaagcacatgcttataaaatattatcagc

SEQ ID NO: 6150 - DNA, 600 bp, Cricetulus griseus; identical to SEQ ID NO: 2508
  misc_feature (555)..(555): n is a, c, g, or t

SEQ ID NO: 6151 - DNA, 356 bp, Cricetulus griseus; identical to SEQ ID NO: 2509

SEQ ID NO: 6152 - DNA, 556 bp, Cricetulus griseus; identical to SEQ ID NO: 2510

SEQ ID NO: 6153 - DNA, 539 bp, Cricetulus griseus; identical to SEQ ID NO: 2511
  misc_feature (448)..(464): n is a, c, g, or t

SEQ ID NO: 6154 - DNA, 552 bp, Cricetulus griseus; identical to SEQ ID NO: 2512

SEQ ID NO: 6155 - DNA, 529 bp, Cricetulus griseus
cttctggtcaccctgggagccttcatctttggccaaaccacagccaatgccatctttgttgacctcttggcatgaacactgccttccagaaaacatgtcaccaagaaccatctctcagagctgtgaagctaccccaagtcccacatcctgttccagctggtgacatcaggacacatttttccatggacagtcatgggacagaatcagcctcaaatctgtggacagctccccacccagctgccttcctgctccccaaccttggcattgtcatagatggtgacaggaggtcccacgtcataggagcttccccctcacccaggtctcaacttcagtcctttgggacctgttaatggagagtgtcagtgagtcacagaagagagagaccattctgacttccctctggaaaaacaaagtcttatacatagtgctggcatccaccacagagcttgtcaggcctgtgctttcagtaccttggggtttagtgcctgcccatgtctctcagaagccaatgatgacttctcctgggacc

SEQ ID NO: 6156 - DNA, 521 bp, Cricetulus griseus; identical to SEQ ID NO: 2514

SEQ ID NO: 6157 - DNA, 539 bp, Cricetulus griseus; identical to SEQ ID NO: 2515
  misc_feature (198)..(221): n is a, c, g, or t
  misc_feature (244)..(264): n is a, c, g, or t

SEQ ID NO: 6158 - DNA, 522 bp, Cricetulus griseus; identical to SEQ ID NO: 2516

SEQ ID NO: 6159 - DNA, 501 bp, Cricetulus griseus; identical to SEQ ID NO: 2517
  misc_feature (46)..(88): n is a, c, g, or t

SEQ ID NO: 6160 - DNA, 570 bp, Cricetulus griseus; identical to SEQ ID NO: 2518

SEQ ID NO: 6161 - DNA, 570 bp, Cricetulus griseus
ctttcaattcttttcttgttttcctccattttctggtttgctatagttaacaggaactcaatatattcctccgtcaccatcagttttccctgatggcttaatgggacttctaatccatgtgtactccggacagccagcatggtctttcctcgcttccccacggtgatgccagagttcctgaagccagaagcaacggccgctgagtgcagggtctgtgcgtcctgcagtgtctggcattgtacatggaggataaatggttcaaacttcaggacagcattgctggttgcgcccttcagagctgccatcacatcatctttcacacaaggtttgtgtgtcaccaggagccagcagcagtgctgtttctgaatcccagaatcgcttgtgctcgcgtccaggaggaggattcggccggcgcaggagctggtggtgaagaactcttcctgcgcgttcaggagctgcaccacccgcacggcgtcctcgtccacgctgcctttccggctgaggtccgccttgcccaggctatgcgccttccagcgcccgaactcggcgcggcggtccatcggcgtcgct

SEQ ID NO: 6162 - DNA, 438 bp, Cricetulus griseus
acaatcccaccgcatgcacacaccatagcaaaataaaaaatttaaaaaaagaaaagcagtcaggactgctgagactggaggattgctgcaagtaaaaggccagtcaggaccacaaagtgagtaccaggctagcctgggggtacagaataaggccttgttccacaccctccaccacaaagtagttgacatgacatatgaagtcatcatttgatgtgatctcagctatacgtaggtaaatagagctatttaccactgctaagcatgatgaatggtaaagctatgggtaatttctaatgactttcctttaaaatttttgtttattattatgtggcatggtgtgtgtggggtggtgtagggtgggtgggtgctcctgccacaatgcaagtggggacagctccatgcagttggttctctcctcccacctttatgctcacttca

SEQ ID NO: 6163 - DNA, 558 bp, Cricetulus griseus; identical to SEQ ID NO: 2521

SEQ ID NO: 6164 - DNA, 452 bp, Cricetulus griseus; identical to SEQ ID NO: 2522

SEQ ID NO: 6165 - DNA, 435 bp, Cricetulus griseus; identical to SEQ ID NO: 2523

SEQ ID NO: 6166 - DNA, 381 bp, Cricetulus griseus; identical to SEQ ID NO: 2524

SEQ ID NO: 6167 - DNA, 559 bp, Cricetulus griseus; identical to SEQ ID NO: 2525

SEQ ID NO: 6168 - DNA, 528 bp, Cricetulus griseus; identical to SEQ ID NO: 2526
  misc_feature (53)..(72): n is a, c, g, or t

SEQ ID NO: 6169 - DNA, 526 bp, Cricetulus griseus; identical to SEQ ID NO: 2527

SEQ ID NO: 6170 - DNA, 418 bp, Cricetulus griseus
  misc_feature (46)..(62): n is a, c, g, or t
  misc_feature (64)..(93): n is a, c, g, or t
ctttggaggctgtcctggaactagctcttatagaccaggctggtcnnnnnnnnnnnnnnnnnannnnnnnnnnnnnnnnnnnnnnnnnnnnnntaaaggcatgcgccaccacccccggccaaaatttttttagatatatactttgtggccttttgcaaggatgagttagccctgctttgctgaggaggaacaatatgcagttttgttaccctgtgaattcgccgagagggaatagtgtgtgtgggagatgagactagaggtgtggtagactctggatagacagtgtaacgttcctttgtttcatcccaacaccaaaatcacctggcccttatgagacagagggctggctacagatgtgctgggtctgtgggctgtagacagcacctgaaaggagagacaggaaatactcaactccccc

SEQ ID NO: 6171 - DNA, 537 bp, Cricetulus griseus; identical to SEQ ID NO: 2529

SEQ ID NO: 6172 - DNA, 495 bp, Cricetulus griseus; identical to SEQ ID NO: 2530

SEQ ID NO: 6173 - DNA, 531 bp, Cricetulus griseus; identical to SEQ ID NO: 2531
  misc_feature (390)..(405): n is a, c, g, or t

SEQ ID NO: 6174 - DNA, 547 bp, Cricetulus griseus; identical to SEQ ID NO: 2532

SEQ ID NO: 6175 - DNA, 557 bp, Cricetulus griseus; identical to SEQ ID NO: 2533

SEQ ID NO: 6176 - DNA, 142 bp, Cricetulus griseus; identical to SEQ ID NO: 2534

SEQ ID NO: 6177 - DNA, 343 bp, Cricetulus griseus; identical to SEQ ID NO: 2535

SEQ ID NO: 6178 - DNA, 288 bp, Cricetulus griseus; identical to SEQ ID NO: 2536
  misc_feature (131)..(148): n is a, c, g, or t

SEQ ID NO: 6179 - DNA, 377 bp, Cricetulus griseus; identical to SEQ ID NO: 2537

SEQ ID NO: 6180 - DNA, 580 bp, Cricetulus griseus; identical to SEQ ID NO: 2538

SEQ ID NO: 6181 - DNA, 580 bp, Cricetulus griseus; identical to SEQ ID NO: 2539

SEQ ID NO: 6182 - DNA, 487 bp, Cricetulus griseus; identical to SEQ ID NO: 2540

SEQ ID NO: 6183 - DNA, 545 bp, Cricetulus griseus; identical to SEQ ID NO: 2541

SEQ ID NO: 6184 - DNA, 485 bp, Cricetulus griseus; identical to SEQ ID NO: 2542

SEQ ID NO: 6185 - DNA, 285 bp, Cricetulus griseus; identical to SEQ ID NO: 2543

SEQ ID NO: 6186 - DNA, 452 bp, Cricetulus griseus; identical to SEQ ID NO: 2544

SEQ ID NO: 6187 - DNA, 410 bp, Cricetulus griseus; identical to SEQ ID NO: 2545
  misc_feature (128)..(156): n is a, c, g, or t

SEQ ID NO: 6188 - DNA, 324 bp, Cricetulus griseus; identical to SEQ ID NO: 2546

SEQ ID NO: 6189 - DNA, 579 bp, Cricetulus griseus; identical to SEQ ID NO: 2547

SEQ ID NO: 6190 - DNA, 600 bp, Cricetulus griseus; identical to SEQ ID NO: 2548
  misc_feature (346)..(364): n is a, c, g, or t

SEQ ID NO: 6191 - DNA, 600 bp, Cricetulus griseus; identical to SEQ ID NO: 2549
  misc_feature (560)..(560): n is a, c, g, or t

SEQ ID NO: 6192 - DNA, 127 bp, Cricetulus griseus
atttcatctggatttgattacttaattcaaagaccatattttagctggccatataaccaagaagctatcagccagaaaacttgaaagttataagcatttcttgaaaataagattttcaaatgtagcc

SEQ ID NO: 6193 - DNA, 498 bp, Cricetulus griseus; identical to SEQ ID NO: 2551
  misc_feature (452)..(452): n is a, c, g, or t

SEQ ID NO: 6194 - DNA, 533 bp, Cricetulus griseus; identical to SEQ ID NO: 2552

SEQ ID NO: 6195 - DNA, 491 bp, Cricetulus griseus; identical to SEQ ID NO: 2553

SEQ ID NO: 6196 - DNA, 579 bp, Cricetulus griseus; identical to SEQ ID NO: 2554
  misc_feature (248)..(274): n is a, c, g, or t
  misc_feature (359)..(377): n is a, c, g, or t

SEQ ID NO: 6197 - DNA, 536 bp, Cricetulus griseus; identical to SEQ ID NO: 2555
  misc_feature (479)..(479): n is a, c, g, or t

SEQ ID NO: 6198 - DNA, 349 bp, Cricetulus griseus
  misc_feature (99)..(99): n is a, c, g, or t
atagaactgaaatgactagaggtagaactgtaaagtgcaatatgataaaatatcctaagttgtatcaatgatcaaaatgtatatacatcaagatagttntatatttgtgcgtaaatatcgtaaacagaagaccctaagcagtcaacatacaataatctaacaatttaagttatctgtagctaacagttgctaaagttagttcactagaaaataggttaattacctatattccatcttaaccatacctttcccatccatatccttaaacttatctaaaagtctgagagtctgctcatcacattccacagcccccaaccctttctgaactcatcttatttttctatccatt

SEQ ID NO: 6199 - DNA, 487 bp, Cricetulus griseus; identical to SEQ ID NO: 2557
  misc_feature (51)..(77): n is a, c, g, or t

SEQ ID NO: 6200 - DNA, 348 bp, Cricetulus griseus; identical to SEQ ID NO: 2558
  misc_feature (101)..(118): n is a, c, g, or t

SEQ ID NO: 6201 - DNA, 200 bp, Cricetulus griseus
  misc_feature (161)..(161): n is a, c, g, or t
ctgactgaaaccagctgtggccaggaccacagaacatctgggtccatatcctgacctatttactcccttgctactctaggccaggggtactcagtgttgttttaactccattacactcagttaggtgtgtgtgtgtgtttgtgtgtatgtgcatgctgtangtgagagagagagtgagtctgtgtgcatgctgtaggtat

SEQ ID NO: 6202 - DNA, 538 bp, Cricetulus griseus; identical to SEQ ID NO: 2560
  misc_feature (66)..(86): n is a, c, g, or t

SEQ ID NO: 6203 - DNA, 483 bp, Cricetulus griseus; identical to SEQ ID NO: 2561

SEQ ID NO: 6204 - DNA, 500 bp, Cricetulus griseus
aaaaaagctaacaacaaatttccctaaattattccataaaatggaaaatgaaggaacatttctgaagtctttctaaaaagctattattacattgacaccaaaaccagacaaagacacaacaagaaagaaactgtaggtcagtatgtgcaaaaattctcaattaaaaaaagaaaaacctgcaaacaggacagattttaagttgaaggttttgtggctgggttgatgtcgcagtctcactgctgggagccttgcccagctatataaagcagtcaattccagctctctatcccccattactaggagagttcactaagggcactccaggagtaaagtggtgtagaactttgtgggagggaccaaccaatgattggtccaacttgaggcccacaccgcaagagggagtcgtgcctgacactgcctggatagccaggaaccagaggctagacaacccatagacccaggatagaaacaacacacaactgacaaattttttttttaaa

SEQ ID NO: 6205 - DNA, 475 bp, Cricetulus griseus; identical to SEQ ID NO: 2563
  misc_feature (105)..(207): n is a, c, g, or t

SEQ ID NO: 6206 - DNA, 501 bp, Cricetulus griseus; identical to SEQ ID NO: 2564

SEQ ID NO: 6207 - DNA, 173 bp, Cricetulus griseus; identical to SEQ ID NO: 2565

SEQ ID NO: 6208 - DNA, 244 bp, Cricetulus griseus; identical to SEQ ID NO: 2566
  misc_feature (40)..(58): n is a, c, g, or t

SEQ ID NO: 6209 - DNA, 566 bp, Cricetulus griseus; identical to SEQ ID NO: 2567

SEQ ID NO: 6210 - DNA, 506 bp, Cricetulus griseus; identical to SEQ ID NO: 2568
  misc_feature (157)..(157): n is a, c, g, or t

SEQ ID NO: 6211 - DNA, 330 bp, Cricetulus griseus; identical to SEQ ID NO: 2569
  misc_feature (259)..(278): n is a, c, g, or t

SEQ ID NO: 6212 - DNA, 580 bp, Cricetulus griseus; identical to SEQ ID NO: 2570

SEQ ID NO: 6213 - DNA, 520 bp, Cricetulus griseus; identical to SEQ ID NO: 2571

SEQ ID NO: 6214 - DNA, 513 bp, Cricetulus griseus; identical to SEQ ID NO: 2572

SEQ ID NO: 6215 - DNA, 526 bp, Cricetulus griseus; identical to SEQ ID NO: 2573

SEQ ID NO: 6216 - DNA, 533 bp, Cricetulus griseus; identical to SEQ ID NO: 2574

SEQ ID NO: 6217 - DNA, 345 bp, Cricetulus griseus; identical to SEQ ID NO: 2575

SEQ ID NO: 6218 - DNA, 221 bp, Cricetulus griseus; identical to SEQ ID NO: 2576

SEQ ID NO: 6219 - DNA, 555 bp, Cricetulus griseus; identical to SEQ ID NO: 2577

SEQ ID NO: 6220 - DNA, 580 bp, Cricetulus griseus; identical to SEQ ID NO: 2578

SEQ ID NO: 6221 - DNA, 578 bp, Cricetulus griseus
acaaagaccgcgaacgggaccgagagcgcgagggccctttccgcaggtcagactcattccccgaaaggagggcccctcggaaggggaacacactttatgtgtatggagaggacatgacgcccaccctcctccgaggggccttctctccctttggaaacatcattgacctctccatggacccacccagaaactgtgccttcgtcacctatgaaaagatggagtttgcagatcaggccgttgctgagctcaatgggacccaggtggaatccgtgcagctcaaagtcaacatagcccgcaaacagcccatgctggatgctgctactggcaaatctgtctggggttcccttgctgtccagaacagccctaagggctgccaccgggacaaaaggacccagattgtgtacagtgacgatctgtaggaaacctgtggatggcttttaggacacgaagctggattccttgtgcctcgtatgcccccaagctggtctcagtaaaatcctggggcagaagttccctcacccccttcagcctctagtctttcaacactgggatcggggttaaaccttcaaaagtgaaaa

SEQ ID NO: 6222 - DNA, 566 bp, Cricetulus griseus; identical to SEQ ID NO: 2580

SEQ ID NO: 6223 - DNA, 558 bp, Cricetulus griseus; identical to SEQ ID NO: 2581

SEQ ID NO: 6224 - DNA, 578 bp, Cricetulus griseus; identical to SEQ ID NO: 2582

SEQ ID NO: 6225 - DNA, 600 bp, Cricetulus griseus; identical to SEQ ID NO: 2583
  misc_feature (411)..(456): n is a, c, g, or t

SEQ ID NO: 6226 - DNA, 280 bp, Cricetulus griseus; identical to SEQ ID NO: 2584

SEQ ID NO: 6227 - DNA, 578 bp, Cricetulus griseus; identical to SEQ ID NO: 2585
  misc_feature (535)..(535): n is a, c, g, or t

SEQ ID NO: 6228 - DNA, 579 bp, Cricetulus griseus; identical to SEQ ID NO: 2586
  misc_feature (443)..(457): n is a, c, g, or t

SEQ ID NO: 6229 - DNA, 556 bp, Cricetulus griseus; identical to SEQ ID NO: 2587

SEQ ID NO: 6230 - DNA, 368 bp, Cricetulus griseus; identical to SEQ ID NO: 2588
  misc_feature (51)..(65): n is a, c, g, or t

SEQ ID NO: 6231 - DNA, 569 bp, Cricetulus griseus; identical to SEQ ID NO: 2589

SEQ ID NO: 6232 - DNA, 579 bp, Cricetulus griseus; identical to SEQ ID NO: 2590

SEQ ID NO: 6233 - DNA, 579 bp, Cricetulus griseus; identical to SEQ ID NO: 2591

SEQ ID NO: 6234 - DNA, 579 bp, Cricetulus griseus; identical to SEQ ID NO: 2592
  misc_feature (397)..(421): n is a, c, g, or t

SEQ ID NO: 6235 - DNA, 562 bp, Cricetulus griseus
attgtttttctataaatttagggtggtttttgaaaaatgacataagagagatatctgtcttagaagtgtgttatactgtacatttttgtttcctcatttatttgctttgagacatggtttgcctgtgtagaccatacatggcctcagactcatgtatgagcctccttcctcagcctccaaagtgctgggattgcaggtgtgtagtactgggtctaccgtgtactgcattttgaaaaccagaatattccagcatcagtttgcctattcttagaataagcagtcttttaaaaaattttttattacctgtttttggagtagaaatagttgtaaactgatactgtgttcagttcaaattctgtctctgccaataactaaccagtttcctgaagtggttttccctgtcctgctgaagctccctcatctgtgcagtgtgcagatggtctcttaagcaccttctcgtttcagagtgctgggtttttcgactttagtttttaatagattttggtgtaacacactagataggtatatgatttagatatttttatttcatctctacatatga

SEQ ID NO: 6236 - DNA, 349 bp, Cricetulus griseus; identical to SEQ ID NO: 2594

SEQ ID NO: 6237 - DNA, 576 bp, Cricetulus griseus; identical to SEQ ID NO: 2595
  misc_feature (271)..(292): n is a, c, g, or t

SEQ ID NO: 6238 - DNA, 576 bp, Cricetulus griseus
  misc_feature (285)..(306): n is a, c, g, or t
tttgtgaattagagtaatacaatgattgtgttattgttttaggtgaaattgctaagtacatgcaaactgtgaaattactggactacactgagaaacctgtttatcaggatttacgtgacattctttcacaaggactaaaagccataggaagtaaagatgatggcaaactggattttagtgctgtggagaatggaagtatggagacagaaccagcctcaaagatgaggcctcttgcttttcattctaccccatcgttttgcttttcaccacagaacgtaagtgtgnnnnnnnnnnnnnnnnnnnnnngttagtttaaacctcatacgtacttggtacttggtgaacctttgtgtaaggatatatcactcatcttggaactcagaaactaatctttgtaagcaagagcatgcttcctttttcatctccagaagccatggaactgtggacggagagcattagaaaccacagagttggcttctggctacacatgcgcatatctacccacccagtcctgcagttactaaattctctgtctctcagtctctgtctctctctgactctgtatctctgtctttc

SEQ ID NO: 6239 - DNA, 578 bp, Cricetulus griseus; identical to SEQ ID NO: 2597
  misc_feature (289)..(335): n is a, c, g, or t

SEQ ID NO: 6240 - DNA, 554 bp, Cricetulus griseus; identical to SEQ ID NO: 2598

SEQ ID NO: 6241 - DNA, 555 bp, Cricetulus griseus; identical to SEQ ID NO: 2599
  misc_feature (460)..(460): n is a, c, g, or t

SEQ ID NO: 6242 - DNA, 568 bp, Cricetulus griseus; identical to SEQ ID NO: 2600

SEQ ID NO: 6243 - DNA, 578 bp, Cricetulus griseus; identical to SEQ ID NO: 2601

SEQ ID NO: 6244 - DNA, 427 bp, Cricetulus griseus; identical to SEQ ID NO: 2602

SEQ ID NO: 6245 - DNA, 569 bp, Cricetulus griseus
tatttggcactggacattcagcaccatctgccagtccagcatttggtgctaacccgaccccaacatttggacaaagtcaaggtgccagccaacctaaccctccaagctttggctctatatcatcttcaacatcgttgttttctgctggttcccagcctgcaccaccacctacttttggggcagtgtcaagcagcagccaacctcctgtgtttgggcagcagcctagtcagtctgcatttggctctgggacagctcctaattccagttctgttttccaatttggcagcagcaccacaaatttcaacttcacaaacaataatccgtcaggagtgttcacatttggtgcaaatcccagcacgccagcagcctcagcccaaccctcaggttcagggggctttcaattcagccagtctccagcatcatttacagtggggtcaaatgggaaaaatatgttctcttcttccggaacttcagtttctggtcgcaagataaagactgctgtcagacgcaggaaataaaggtcacgaaggtgttatacccaacagttttatcaacggctggtgcctgct

SEQ ID NO: 6246 - DNA, 580 bp, Cricetulus griseus; identical to SEQ ID NO: 2604

SEQ ID NO: 6247 - DNA, 568 bp, Cricetulus griseus; identical to SEQ ID NO: 2605
  misc_feature (408)..(408): n is a, c, g, or t

SEQ ID NO: 6248 - DNA, 236 bp, Cricetulus griseus
  misc_feature (139)..(159): n is a, c, g, or t
cttgaaggagaagaaggaagttgtggaggagacagagaatggaagagacgcacctgccaatggaaatgctaatgaggaaaatggggagcaggaggctgacaatgaggtagatgaagaagaggaagaaggtggggaggannnnnnnnnnnnnnnnnnnnngcgacggtgaggaagaggatggagatgaagatgaggaagctgaggctcctacgggcaagcgggtagctgaagatgat

SEQ ID NO: 6249 - DNA, 580 bp, Cricetulus griseus; identical to SEQ ID NO: 2607
  misc_feature (96)..(111): n is a, c, g, or t

SEQ ID NO: 6250 - DNA, 469 bp, Cricetulus griseus; identical to SEQ ID NO: 2608

SEQ ID NO: 6251 - DNA, 523 bp, Cricetulus griseus; identical to SEQ ID NO: 2609

SEQ ID NO: 6252 - DNA, 385 bp, Cricetulus griseus; identical to SEQ ID NO: 2610

SEQ ID NO: 6253 - DNA, 579 bp, Cricetulus griseus; identical to SEQ ID NO: 2611

SEQ ID NO: 6254 - DNA, 554 bp, Cricetulus griseus; identical to SEQ ID NO: 2612

SEQ ID NO: 6255 - DNA, 550 bp, Cricetulus griseus
agactttatgggaagggtgggtggcagtagtgaacaaatgtcactctgtcccttataaaaccagtaaaagggagtattggagtttgaatgttggcagcaggtcatcaggcagggtgcaccttccacagaggagtacaaggtatgcccagccaacattctggagtcggttgagggaaggggatgtattaattggcagcacattgcctggcactcactccacagagtggcaggtttgatggcactagttaaggccactcataccccctaagaaatgatgttggggatgggcagctgtgctgggctgtctgtctccctgcctggggccacatggtgtccacatacagagcgtaatggatgggagtcaggaccagagtcacctcttataatgccagcagctgttagactctgatgtctacaaatgacaaggaaagttgtgttttcactttctgggaactcctataagccctggctcaaggactttgcattgtgtgtcatgtacatctttttaagtgttctttgctgttctggaattgtcgttggtttttcctta

SEQ ID NO: 6256 - DNA, 579 bp, Cricetulus griseus; identical to SEQ ID NO: 2614

SEQ ID NO: 6257 - DNA, 578 bp, Cricetulus griseus; identical to SEQ ID NO: 2615

SEQ ID NO: 6258 - DNA, 566 bp, Cricetulus griseus; identical to SEQ ID NO: 2616
  misc_feature (508)..(508): n is a, c, g, or t

SEQ ID NO: 6259 - DNA, 389 bp, Cricetulus griseus
tcttctttcatttatattttttgactcttacctctatatttttgttgttaataaaccaactgccacagggcgggacacacgatggagttctaaggacagaagggactagaagaaggaggagtcgcgcgacaatggatcttactgatcccaaaggaaatgttaaacccgtattacggcgcactttgaatattcagctacgaataattacaccctccaaataaatccaaactcgcggcctgtgtaatgaagatcacctgtcttacttcaagactcattgtttactgaggctggaatggctgttaatcatggcaagctgctagactagctggttacaccaccccttttacaagatgatgcttcagaagccgataaccctgcatgacatggcc

SEQ ID NO: 6260 - DNA, 571 bp, Cricetulus griseus; identical to SEQ ID NO: 2618

SEQ ID NO: 6261 - DNA, 569 bp, Cricetulus griseus; identical to SEQ ID NO: 2619

SEQ ID NO: 6262 - DNA, 579 bp, Cricetulus griseus; identical to SEQ ID NO: 2620

SEQ ID NO: 6263 - DNA, 579 bp, Cricetulus griseus; identical to SEQ ID NO: 2621

SEQ ID NO: 6264 - DNA, 581 bp, Cricetulus griseus; identical to SEQ ID NO: 2622

SEQ ID NO: 6265 - DNA, 566 bp, Cricetulus griseus; identical to SEQ ID NO: 2623

SEQ ID NO: 6266 - DNA, 485 bp, Cricetulus griseus; identical to SEQ ID NO: 2624
  misc_feature (447)..(447): n is a, c, g, or t

SEQ ID NO: 6267 - DNA, 279 bp, Cricetulus griseus; identical to SEQ ID NO: 2625

SEQ ID NO: 6268 - DNA, 546 bp, Cricetulus griseus; identical to SEQ ID NO: 2626
  misc_feature (452)..(469): n is a, c, g, or t

SEQ ID NO: 6269 - DNA, 580 bp, Cricetulus griseus; identical to SEQ ID NO: 2627

SEQ ID NO: 6270 - DNA, 530 bp, Cricetulus griseus; identical to SEQ ID NO: 2628

SEQ ID NO: 6271 - DNA, 480 bp, Cricetulus griseus; identical to SEQ ID NO: 2629

SEQ ID NO: 6272 - DNA, 579 bp, Cricetulus griseus; identical to SEQ ID NO: 2630

SEQ ID NO: 6273 - DNA, 547 bp, Cricetulus griseus; identical to SEQ ID NO: 2631

SEQ ID NO: 6274 - DNA, 496 bp, Cricetulus griseus; identical to SEQ ID NO: 2632

SEQ ID NO: 6275 - DNA, 578 bp, Cricetulus griseus; identical to SEQ ID NO: 2633

SEQ ID NO: 6276 - DNA, 260 bp, Cricetulus griseus; identical to SEQ ID NO: 2634

SEQ ID NO: 6277 - DNA, 555 bp, Cricetulus griseus; identical to SEQ ID NO: 2635

SEQ ID NO: 6278 - DNA, 418 bp, Cricetulus griseus; identical to SEQ ID NO: 2636

SEQ ID NO: 6279 - DNA, 483 bp, Cricetulus griseus; identical to SEQ ID NO: 2637

SEQ ID NO: 6280 - DNA, 425 bp, Cricetulus griseus; identical to SEQ ID NO: 2638

SEQ ID NO: 6281 - DNA, 425 bp, Cricetulus griseus
ttaatggctttcctggcccaaagtccaaatgctaccacaatcctccctgaaacacaaagccaggtttgtcacagcagcacaccatataatctaataccaatttctgtcttagtttgggtttccaatgctgtgataaagcaccataaccaaaagcaacttgaggaggaaagggtttatttctacttacacttcacattaacagtcattcaccaaaggaagttagagcagaaactcaagacaggaactttgaggcaggatttgaagtaggggccgtggaggaatgctactactggctttctcagcccacttttttttttaatcactcaggaccacctacccacgggtggaatcacatcccatgagatcagcctacctacatcagtctttaatcaagagaatgcacaacagacttgtctactggccaa

SEQ ID NO: 6282 - DNA, 494 bp, Cricetulus griseus; identical to SEQ ID NO: 2640

SEQ ID NO: 6283 - DNA, 243 bp, Cricetulus griseus; identical to SEQ ID NO: 2641

SEQ ID NO: 6284 - DNA, 527 bp, Cricetulus griseus; identical to SEQ ID NO: 2642
  misc_feature (50)..(119): n is a, c, g, or t
  misc_feature (148)..(165): n is a, c, g, or t
  misc_feature (176)..(194): n is a, c, g, or t
  misc_feature (318)..(350): n is a, c, g, or t

SEQ ID NO: 6285 - DNA, 565 bp, Cricetulus griseus; identical to SEQ ID NO: 2643

SEQ ID NO: 6286 - DNA, 558 bp, Cricetulus griseus
tttgtaagcttctcagaagttttcagcagtcatgtgggaaagatatccaggttggagtaattggtttcccaaatgtggggaaaagcagcatcattaatagcttaaaacaagaacggatatgtactgttggagttcctatgggacttacaaggagcatgcagattgtcccgttggacaagcagatcacagtcatagatagtccatgcttcattatctcaccatgtaactcctctgctgcacttgctttacggagtccagtaagcattgaagtactaagaccattggaggctgccagtgccattctatcccaggctgatagtcaacaggtggtattaaaatacactgtcccggggtataaggattctctggatttttttactaaacttgctcagaaaagaggtctgcaccaaaaaggtggaagcccaaatattgaaagtgctgctaaactgctatggtctgagtggacaggtgcctcattaggttactactgtcaccctcctgcatcctggaatcctccacattttaatgagaatattgcagcaaacatgaagaaaggct

SEQ ID NO: 6287 - DNA, 580 bp, Cricetulus griseus; identical to SEQ ID NO: 2645

SEQ ID NO: 6288 - DNA, 464 bp, Cricetulus griseus; identical to SEQ ID NO: 2646

SEQ ID NO: 6289 - DNA, 493 bp, Cricetulus griseus; identical to SEQ ID NO: 2647

SEQ ID NO: 6290 - DNA, 236 bp, Cricetulus griseus
tttccctggatatcctgtgagtatttctatcaaaatactaaaatcatttttatcttttgtctgttttcagtcctgttgtcttgccttacagcaagtggaggagaggtctgagacattgagtccagctttttggccagggagaaagtttattgaacaaaggaagaatctcttccactcttaaaacattgtcagtatgactaagatccacaatgctaggctttgtgtgtgactagtta

SEQ ID NO: 6291 - DNA, 490 bp, Cricetulus griseus; identical to SEQ ID NO: 2649
  misc_feature (173)..(232): n is a, c, g, or t

SEQ ID NO: 6292 - DNA, 251 bp, Cricetulus griseus; identical to SEQ ID NO: 2650

SEQ ID NO: 6293 - DNA, 430 bp, Cricetulus griseus; identical to SEQ ID NO: 2651
  misc_feature (333)..(350): n is a, c, g, or t

SEQ ID NO: 6294 - DNA, 310 bp, Cricetulus griseus
aatcttcaaactaacacagtagcccaagaagaacagatttcattttttgcagcacagaactcaatttctccacttcagtcaacatcaaacaccgagcagcaagctgcttttcaacagcagcctccaatctcacacatcccaacccctattctttcccaggaacaggcacaatctactcagcaaggtttatttcagcctcaggtggcccttggctcccttccatctaattcaatatctcaaaaccagcaaggagcaattttccaaacacagcactcaatagttggcatgcagagtaactctccatcccagg

SEQ ID NO: 6295 - DNA, 522 bp, Cricetulus griseus; identical to SEQ ID NO: 2653

SEQ ID NO: 6296 - DNA, 298 bp, Cricetulus griseus; identical to SEQ ID NO: 2654

SEQ ID NO: 6297 - DNA, 538 bp, Cricetulus griseus; identical to SEQ ID NO: 2655

SEQ ID NO: 6298 - DNA, 433 bp, Cricetulus griseus
tttccaatatgaagactgtagattgtgtggagcgcaagggcaagtacatgtacttcacagtggtgatggcgaagggcaaagagatcgactttcggtgcccccaggaccagggctggaactcggagatcacgttgcagatggtgcaatacaaaaatcgtcaggccatactggcagtcaaatctacgcggcagaagcagcagcacctggtccagcagcagcctccgcagacgcagcagatccagccccagccccagccccagccccagccccagccccagccgcagccccagtcccagccgcagatccagcctcaaccgcagatccagcctcaaccacagattcagccacaaccgcagcccaagcctcagccgcagcagctccactcttacccgcacccgcacccgcacccgcacgcgcaccctcatcctcaccc

SEQ ID NO: 6299 - DNA, 541 bp, Cricetulus griseus; identical to SEQ ID NO: 2657

SEQ ID NO: 6300 - DNA, 306 bp, Cricetulus griseus; identical to SEQ ID NO: 2658

SEQ ID NO: 6301 - DNA, 370 bp, Cricetulus griseus
tccgccctgagcactcacacaagcactttctcagcactgctgctgcgggcagtgtttggacagcatcacctgcatgatgtttctgcatcattccctaagtctggtttcatattaagtgttgccatctagtgacacccacagtcacttcacaggcccaccatcatgctctcacagaactcaacttgtatcctcagtaataaaatcagccacaaaaggagaaaacagccagcagggttgcttaaagaagaaatgcactgttttttcttttctttttttttttgaaacaaaatctcactcactttgtagccctacctggctggaactcactatgtaaagcaaactggcttgaactcaaaaatccccctgcctt

SEQ ID NO: 6302 - DNA, 433 bp, Cricetulus griseus
agcaaatcagctagcatctgcaatacaatgcagagcagagctctggaggttaggaccctgagaaattctctaatagaatcagttctccactcccaacaagtaaactagtttataattgtttcaaagaagaagttagtatatcatccccttgtattcatccttgtctattaaaatataacaccacataaaaggtcagcgatcagattcatttttgaagctacatgttaaaatttattctgtggtcaggcttcagtaatactatgtaactacaactacatctactagttattatctctctgtcaatctccatctgaatattatatcacaacaagagtgtcatctaaactttccggtttccagaaaaaatgtttaaatgcaaatagtgtttacatttaataacaaaacataagaatcctttttggagattttatgt

SEQ ID NO: 6303 - DNA, 513 bp, Cricetulus griseus
  misc_feature (332)..(347): n is a, c, g, or t
acatggtacctgctccagtgccgcgtgcggcccgggaaccctgggctgctggcgcctgcgcagagtcctctgtcccagggaaaggctcgggcaaaaggcggttgagattggcagagtgaaatattactgctgagggaacgtagcagggcacacgtctctctgtgtgtctgggtgcctcgtttctccaccacctacttacttcctggttgcagcttctctccttttgggacttttgcacccgaagctccagatttgctaccctgcagtgttgcggaaccttcaggagtggcatcggtgcactgcagagaccctaccctccttgctaccttacnnnnnnnnnnnnnnnnggctgattccttacacacattctctctgctcttcccatgcaaatcagacctcggttgcctcagcgtcctacccttctgcagggctgcagcccggccaccccaaaaccttattgcttggtgcctggaatcctgattttcagccgcggggtccacttgtctccctcag

SEQ ID NO: 6304 - DNA, 491 bp, Cricetulus griseus; identical to SEQ ID NO: 2662

SEQ ID NO: 6305 - DNA, 579 bp, Cricetulus griseus; identical to SEQ ID NO: 2663

SEQ ID NO: 6306 - DNA, 256 bp, Cricetulus griseus; identical to SEQ ID NO: 2664
  misc_feature (111)..(141): n is a, c, g, or t

SEQ ID NO: 6307 - DNA, 562 bp, Cricetulus griseus; identical to SEQ ID NO: 2665

SEQ ID NO: 6308 - DNA, 535 bp, Cricetulus griseus; identical to SEQ ID NO: 2666

SEQ ID NO: 6309 - DNA, 475 bp, Cricetulus griseus; identical to SEQ ID NO: 2667

SEQ ID NO: 6310 - DNA, 517 bp, Cricetulus griseus; identical to SEQ ID NO: 2668

SEQ ID NO: 6311 - DNA, 562 bp, Cricetulus griseus; identical to SEQ ID NO: 2669
  misc_feature (107)..(126): n is a, c, g, or t
  misc_feature (177)..(205): n is a, c, g, or t

SEQ ID NO: 6312 - DNA, 562 bp, Cricetulus griseus
  misc_feature (358)..(386): n is a, c, g, or t
  misc_feature (437)..(456): n is a, c, g, or t
agcacaccatgaatggggttaatttgaatttcacttagttttaccaggcatgttttgcttattatatgtggctttactggtagcgtatttctaagaaaaataaggtcatcttcagttaaggaagaacctagaatgtaaaagaattggcttatacattatgtaaatgaaagcgcatttaaaagctgtttcatcaaacacaacttctttactttgtaaaacctctcattaaaggtagagttctgcctcttacatgcaaaactggtaatcaaatcatgtaaagaaattttgactgccaaaatacatgtgaaaaaaacaatagttcagctgggcagtggtgactcacgcctccagtcccacnnnnnnnnnnnnnnnnnnnnnnnnnnnnncgagctcaaggccagcccggtctagcaagttccaggacagctagggctgtnnnnnnnnnnnnnnnnnnnnggagaaacaaactaacaaatatagaaacaaaacaaaaatgatagttctggatgatatcatttcccatccagcccaatgtgctgacaggtatgtgtgggtgggtgta

SEQ ID NO: 6313 - DNA, 410 bp, Cricetulus griseus
  misc_feature (29)..(51): n is a, c, g, or t
  misc_feature (53)..(80): n is a, c, g, or t
  misc_feature (275)..(309): n is a, c, g, or t
cagagtgagtgtcaggacaggctccaaannnnnnnnnnnnnnnnnnnnnnngnnnnnnnnnnnnnnnnnnnnnnnnnnnngttatttcccactcagaaggcataaggtgtgcgccaccaccacttggcgatttattttattttcatttatgtgtatacctgtgtgaatctatatgtatgcaaacatgcctgtgtgtgcccttggagaccaaaacggggcatcagatcccctggagctggagtttcaggcaactgtgagctgtctagtgagtgtgnnnnnnnnnnnnnnnnnnnnnnnnnnnnnnnnnnngagtgctcttacctgccaaacctaacaactctatggctcacaaggttcagttaagctcattagaggcctaaggacaagctcctgcttcgacgcaaggagta

SEQ ID NO: 6314 - DNA, 533 bp, Cricetulus griseus; identical to SEQ ID NO: 2672

SEQ ID NO: 6315 - DNA, 444 bp, Cricetulus griseus; identical to SEQ ID NO: 2673
  misc_feature (363)..(405): n is a, c, g, or t

SEQ ID NO: 6316 - DNA, 566 bp, Cricetulus griseus; identical to SEQ ID NO: 2674

SEQ ID NO: 6317 - DNA, 558 bp, Cricetulus griseus; identical to SEQ ID NO: 2675
  misc_feature (182)..(202): n is a, c, g, or t

SEQ ID NO: 6318 - DNA, 508 bp, Cricetulus griseus; identical to SEQ ID NO: 2676

SEQ ID NO: 6319 - DNA, 429 bp, Cricetulus griseus; identical to SEQ ID NO: 2677

SEQ ID NO: 6320 - DNA, 84 bp, Cricetulus griseus; identical to SEQ ID NO: 2678

SEQ ID NO: 6321 - DNA, 577 bp, Cricetulus griseus; identical to SEQ ID NO: 2679
  misc_feature (31)..(46): n is a, c, g, or t
  misc_feature (309)..(321): n is a, c, g, or t
  misc_feature (323)..(337): n is a, c, g, or t

SEQ ID NO: 6322 - DNA, 538 bp, Cricetulus griseus; identical to SEQ ID NO: 2680

SEQ ID NO: 6323 - DNA, 567 bp, Cricetulus griseus; identical to SEQ ID NO: 2681

SEQ ID NO: 6324 - DNA, 567 bp, Cricetulus griseus
tgcaatgtggtataaggcactcattgcattcatgttaaacagtggtggcttccgctccgccagctcaatacaggttatccccaaggaccagacatctactttgccatcgtattgcccctcatccatggctaggatcacctctggagccatccagtatggagtgcccacaaaggagttagcaggtgccatgatagatgcggagccaaagtcccccaattttaccaagcctggttcagacagcaagatgtttccagccttcacatccctatggatcatgttgtgcgagtgtagatatgccaggccctgaagtgccccatgagtcacagctgcaatctctacctcctgaaggggcttcttgtgcacttctagaagatcagaagctgagcccaggcaatactccatcaccagccaagctgtgtgctccctcaggtaacagccccggtactgaatagtattgggatgtcgtagcttctgtaagaaccgcacctccttgatgatgtcctgccatttctcatttgactgcttcccactataggacattttcttgatggccaccacctcactgtt

SEQ ID NO: 6325 - DNA, 432 bp, Cricetulus griseus; identical to SEQ ID NO: 2683

SEQ ID NO: 6326 - DNA, 575 bp, Cricetulus griseus; identical to SEQ ID NO: 2684

SEQ ID NO: 6327 - DNA, 536 bp, Cricetulus griseus; identical to SEQ ID NO: 2685

SEQ ID NO: 6328 - DNA, 370 bp, Cricetulus griseus
aagaagtgttttctataattcttcaagtgtcaacttttaatacatgaattaaatccagttaagcttagcagtctccctgcaaggtcaactccagtatatgcacggactgaggaggtgacaagatactcctgtgttccttccagtcagcccttggattacttggaatttccacctggaaggttgcttctccacagtgatttcacattacaggaaggttttccttctttgtttctcagacctggtcctgtagacgggaaggagcctggacacagtgacccaacacattcacaaaggccctgcaggaccaccatggcttatgatgactccatgaagaaagaagattgctttgatggtgatcacagctttgaag

SEQ ID NO: 6329 - DNA, 472 bp, Cricetulus griseus; identical to SEQ ID NO: 2687

SEQ ID NO: 6330 - DNA, 552 bp, Cricetulus griseus; identical to SEQ ID NO: 2688

SEQ ID NO: 6331 - DNA, 419 bp, Cricetulus griseus; identical to SEQ ID NO: 2689

SEQ ID NO: 6332 - DNA, 580 bp, Cricetulus griseus; identical to SEQ ID NO: 2690
  misc_feature (177)..(191): n is a, c, g, or t

SEQ ID NO: 6333 - DNA, 478 bp, Cricetulus griseus; identical to SEQ ID NO: 2691

SEQ ID NO: 6334 - DNA, 586 bp, Cricetulus griseus; identical to SEQ ID NO: 2692

SEQ ID NO: 6335 - DNA, 263 bp, Cricetulus griseus; identical to SEQ ID NO: 2693
  misc_feature (41)..(58): n is a, c, g, or t
  misc_feature (99)..(165): n is a, c, g, or t

SEQ ID NO: 6336 - DNA, 537 bp, Cricetulus griseus; identical to SEQ ID NO: 2694
  misc_feature (419)..(453): n is a, c, g, or t

SEQ ID NO: 6337 - DNA, 544 bp, Cricetulus griseus; identical to SEQ ID NO: 2695

SEQ ID NO: 6338 - DNA, 430 bp, Cricetulus griseus
  misc_feature (333)..(365): n is a, c, g, or t
agtgtgttcaccagcctagtgaacgttgctcattttaaacctacacagacacacagacacagacacacacacaccctagtgtgttcaccagcccactgaacactatactcattttaaaccatctgctagctctacagggggccaggaggaagttcagcatgtagggcagacatgagcaggagggcatgagcgcctgcacacccacctcgaacgccgcactgtccggtaggcactgggcagagagtgcttggcttttgagtgggatctagacctgggcttggaagacgagtggtacttgggggagcgggacctcgttcgagaccgttttttgtnnnnnnnnnnnnnnnnnnnnnnnnnnnnnnnnntcggtgggtctctacatctacttgaaggcctttctggaggcttcacctctaacatgggcagagtt

SEQ ID NO: 6339 - DNA, 408 bp, Cricetulus griseus; identical to SEQ ID NO: 2697

SEQ ID NO: 6340 - DNA, 579 bp, Cricetulus griseus; identical to SEQ ID NO: 2698

SEQ ID NO: 6341 - DNA, 544 bp, Cricetulus griseus; identical to SEQ ID NO: 2699

SEQ ID NO: 6342 - DNA, 546 bp, Cricetulus griseus; identical to SEQ ID NO: 2700

SEQ ID NO: 6343 - DNA, 570 bp, Cricetulus griseus; identical to SEQ ID NO: 2701
  misc_feature (75)..(112): n is a, c, g, or t

SEQ ID NO: 6344 - DNA, 389 bp, Cricetulus griseus; identical to SEQ ID NO: 2702
  misc_feature (53)..(67): n is a, c, g, or t

SEQ ID NO: 6345 - DNA, 444 bp, Cricetulus griseus; identical to SEQ ID NO: 2703

SEQ ID NO: 6346 - DNA, 302 bp, Cricetulus griseus; identical to SEQ ID NO: 2704
  misc_feature (117)..(139): n is a, c, g, or t

SEQ ID NO: 6347 - DNA, 580 bp, Cricetulus griseus; identical to SEQ ID NO: 2705
  misc_feature (343)..(343): n is a, c, g, or t

SEQ ID NO: 6348 - DNA, 505 bp, Cricetulus griseus; identical to SEQ ID NO: 2706

SEQ ID NO: 6349 - DNA, 485 bp, Cricetulus griseus; identical to SEQ ID NO: 2707
  misc_feature (359)..(425): n is a, c, g, or t

SEQ ID NO: 6350 - DNA, 538 bp, Cricetulus griseus; identical to SEQ ID NO: 2708

SEQ ID NO: 6351 - DNA, 504 bp, Cricetulus griseus; identical to SEQ ID NO: 2709

SEQ ID NO: 6352 - DNA, 538 bp, Cricetulus griseus; identical to SEQ ID NO: 2710

SEQ ID NO: 6353 - DNA, 461 bp, Cricetulus griseus; identical to SEQ ID NO: 2711

SEQ ID NO: 6354 - DNA, 546 bp, Cricetulus griseus; identical to SEQ ID NO: 2712

SEQ ID NO: 6355 - DNA, 532 bp, Cricetulus griseus; identical to SEQ ID NO: 2713

SEQ ID NO: 6356 - DNA, 472 bp, Cricetulus griseus; identical to SEQ ID NO: 2714

SEQ ID NO: 6357 - DNA, 393 bp, Cricetulus griseus; identical to SEQ ID NO: 2715
  misc_feature (243)..(299): n is a, c, g, or t

SEQ ID NO: 6358 - DNA, 467 bp, Cricetulus griseus; identical to SEQ ID NO: 2716

SEQ ID NO: 6359 - DNA, 555 bp, Cricetulus griseus; identical to SEQ ID NO: 2717

SEQ ID NO: 6360 - DNA, 478 bp, Cricetulus griseus; identical to SEQ ID NO: 2718

SEQ ID NO: 6361 - DNA, 478 bp, Cricetulus griseus; identical to SEQ ID NO: 2719

SEQ ID NO: 6362 - DNA, 555 bp, Cricetulus griseus; identical to SEQ ID NO: 2720

SEQ ID NO: 6363 - DNA, 578 bp, Cricetulus griseus; identical to SEQ ID NO: 2721

SEQ ID NO: 6364 - DNA, 181 bp, Cricetulus griseus; identical to SEQ ID NO: 2722

SEQ ID NO: 6365 - DNA, 531 bp, Cricetulus griseus; identical to SEQ ID NO: 2723

SEQ ID NO: 6366 - DNA, 467 bp, Cricetulus griseus; identical to SEQ ID NO: 2724

SEQ ID NO: 6367 - DNA, 523 bp, Cricetulus griseus; identical to SEQ ID NO: 2725

SEQ ID NO: 6368 - DNA, 471 bp, Cricetulus griseus; identical to SEQ ID NO: 2726
  misc_feature (43)..(62): n is a, c, g, or t

SEQ ID NO: 6369 - DNA, 581 bp, Cricetulus griseus; identical to SEQ ID NO: 2727
  misc_feature (34)..(69): n is a, c, g, or t

SEQ ID NO: 6370 - DNA, 578 bp, Cricetulus griseus; identical to SEQ ID NO: 2728
  misc_feature (177)..(235): n is a, c, g, or t

SEQ ID NO: 6371 - DNA, 543 bp, Cricetulus griseus; identical to SEQ ID NO: 2729
  misc_feature (222)..(222): n is a, c, g, or t

SEQ ID NO: 6372 - DNA, 493 bp, Cricetulus griseus; identical to SEQ ID NO: 2730

SEQ ID NO: 6373 - DNA, 578 bp, Cricetulus griseus; identical to SEQ ID NO: 2731

SEQ ID NO: 6374 - DNA, 521 bp, Cricetulus griseus; identical to SEQ ID NO: 2732

SEQ ID NO: 6375 - DNA, 580 bp, Cricetulus griseus; identical to SEQ ID NO: 2733

SEQ ID NO: 6376 - DNA, 503 bp, Cricetulus griseus; identical to SEQ ID NO: 2734

SEQ ID NO: 6377 - DNA, 523 bp, Cricetulus griseus; identical to SEQ ID NO: 2735

SEQ ID NO: 6378 - DNA, 549 bp, Cricetulus griseus; identical to SEQ ID NO: 2736
  misc_feature (109)..(123): n is a, c, g, or t

SEQ ID NO: 6379 - DNA, 498 bp, Cricetulus griseus; identical to SEQ ID NO: 2737
  misc_feature (464)..(464): n is a, c, g, or t

SEQ ID NO: 6380 - DNA, 474 bp, Cricetulus griseus
ccaccaggagcagatgctggcccagtacatggagagcttcactcagggctccattgaggcccacaagaggggctcccgcttctggattcaggacaaaggccctattgtagagagttacattggcttcattgagagctaccgtgacccctttggctcccgaggagagtttgaaggcttcgtggccatggtgaacaaagccatgagtgccaagtttgagcggctggtggcaagtgctgagcagctgctcaaggagctaccctggcctcctgcctttgagaaggataagttcctcacccctgacttcacctccctggatgtcctcacctttgctggctctggcatccctgccggcatcaacatccccaactacgatgacctgagacagacggaaggctttaagaatgtgtctctcgggaatgtgctggccgtggcctatgccacaaagcgggagaaactcacgttcttggaggaaga

SEQ ID NO: 6381 - DNA, 372 bp, Cricetulus griseus; identical to SEQ ID NO: 2739

SEQ ID NO: 6382 - DNA, 507 bp, Cricetulus griseus; identical to SEQ ID NO: 2740

SEQ ID NO: 6383 - DNA, 536 bp, Cricetulus griseus; identical to SEQ ID NO: 2741

SEQ ID NO: 6384 - DNA, 598 bp, Cricetulus griseus; identical to SEQ ID NO: 2742

SEQ ID NO: 6385 - DNA, 523 bp, Cricetulus griseus; identical to SEQ ID NO: 2743
  misc_feature (222)..(240): n is a, c, g, or t
  misc_feature (463)..(478): n is a, c, g, or t

SEQ ID NO: 6386 - DNA, 556 bp, Cricetulus griseus; identical to SEQ ID NO: 2744

SEQ ID NO: 6387 - DNA, 473 bp, Cricetulus griseus; identical to SEQ ID NO: 2745

SEQ ID NO: 6388 - DNA, 553 bp, Cricetulus griseus; identical to SEQ ID NO: 2746

SEQ ID NO: 6389 - DNA, 559 bp, Cricetulus griseus; identical to SEQ ID NO: 2747
  misc_feature (39)..(53): n is a, c, g, or t

SEQ ID NO: 6390 - DNA, 496 bp, Cricetulus griseus; identical to SEQ ID NO: 2748

SEQ ID NO: 6391 - DNA, 521 bp, Cricetulus griseus; identical to SEQ ID NO: 2749

SEQ ID NO: 6392 - DNA, 579 bp, Cricetulus griseus; identical to SEQ ID NO: 2750

SEQ ID NO: 6393 - DNA, 418 bp, Cricetulus griseus; identical to SEQ ID NO: 2751

SEQ ID NO: 6394 - DNA, 505 bp, Cricetulus griseus; identical to SEQ ID NO: 2752

SEQ ID NO: 6395 - DNA, 573 bp, Cricetulus griseus; identical to SEQ ID NO: 2753

SEQ ID NO: 6396 - DNA, 579 bp, Cricetulus griseus; identical to SEQ ID NO: 2754

SEQ ID NO: 6397 - DNA, 404 bp, Cricetulus griseus; identical to SEQ ID NO: 2755
  misc_feature (139)..(166): n is a, c, g, or t

SEQ ID NO: 6398 - DNA, 402 bp, Cricetulus griseus; identical to SEQ ID NO: 2756

SEQ ID NO: 6399 - DNA, 490 bp, Cricetulus griseus; identical to SEQ ID NO: 2757

SEQ ID NO: 6400 - DNA, 526 bp, Cricetulus griseus; identical to SEQ ID NO: 2758
  misc_feature (465)..(465): n is a, c, g, or t

SEQ ID NO: 6401 - DNA, 541 bp, Cricetulus griseus
  misc_feature (174)..(186): n is a, c, g, or t
cttggggagctcccatttcctgggagcaggccgacccctttgcatctttaaaaaaagtgggccaagattccatagtgctgctgatttgtatcacggtgtttctctcctacctaccggaggcaggccagtactccagcttcttcttatacctcagacagataatgaaattttccnnnnnnnnnnnnncagcctttatagcagtccttggcattctgtccattattgcacagaccatagtcttgagtttactcatgagatcaattggaaataagaataccatcttattgggtctgggatttcaaatattgcagctggcatggtatggctttggttcagaaccttggatgatgtgggctgctggggcagtcgcagccatgtctagcattacctttccagctgttagtgcccttggttcacgaactgctgatgctgatcaacagggtgttgttcaaagaatgataacaggaatccgaggattgtgcaatggtctgggaccagccctttatgggttcattttctacatattccatgtggaacttaa

SEQ ID NO: 6402 - DNA, 116 bp, Cricetulus griseus
ctccaagggatcaaccccctttattacccaatgtaggcacacaacggaagggggcacatgcacatacacactcctttatacacttaagacacagacagatgcccccatacatgaat

SEQ ID NO: 6403 - DNA, 470 bp, Cricetulus griseus; identical to SEQ ID NO: 2761
  misc_feature (280)..(280): n is a, c, g, or t

SEQ ID NO: 6404 - DNA, 600 bp, Cricetulus griseus; identical to SEQ ID NO: 2762
  misc_feature (108)..(146): n is a, c, g, or t

SEQ ID NO: 6405 - DNA, 581 bp, Cricetulus griseus; identical to SEQ ID NO: 2763
  misc_feature (61)..(87): n is a, c, g, or t

SEQ ID NO: 6406 - DNA, 447 bp, Cricetulus griseus
gccgcagctgtagatacagttaatgccacacccatgtcagggtcaaaagaatgagtttggaggagccaaagaagatgaccagagaggactggaggaaaaagaaggagctagaagaacagagaaaattgggcaatgcacctgcagaagttgatgaagagggaaaagacatcaaccctcatattcctcaatacatttcttcggttccgtggtacattgatccctcaaaaagacccacgttaaaacatcagagaccacagccagagaaacagaagcaattcagttcctctggggaatggtacaagagaggtgtgaaggagaattctataactaccaagtaccgcaaaggggcatgtgaaaattgtggggccatgacacacaaaaagaaagagtgctttgagcggccaaggcgggttggagctaaatttacaagcactaacatcgctccag

SEQ ID NO: 6407 - DNA, 259 bp, Cricetulus griseus; identical to SEQ ID NO: 2765

SEQ ID NO: 6408 - DNA, 255 bp, Cricetulus griseus
catgttttagaagccacctatggtattaacattataaagcctggagaagatgaagacccctaccgacctccaacctcagaagagctgttgacggcttatggatgcatgcgagggtgcatgacagcacatggacaaccagaccagcctcgatccgcacgttacatcctgaaggactatgtcaaagggaaactgttgtactgccacccccctcctggaagagatcctgtggcgttccagcatcaacaccaacaactt

SEQ ID NO: 6409 - DNA, 506 bp, Cricetulus griseus
tgaagcggttgggcaacactgatgggctgcccagggtgcagctgtcttctcctgggcagctcttcacagcactggagagagactcggtccagctgtgtacgtgggttggggaactcttcctggaactacacaatggcacctacactacccatgcccagctcaagaagaggaatcgggaatgtgagcaaatccttcatgacgtggagatgctgagcagcctggccctagcccgcagtgcccacttcctatacccagcagcccagttgcagcacctctggagactcctactcctcaaccagtttcatgatgtgttgactggaagctgcattcagctggtggcagaagatgccatgaactactatgaagacatccattcccatggcaatacgctgctcaatgctgcagccgcagccttatgtgctggggagccaggtcctaagggcctcctcgttatcaacacgctgccctggaagcgcactgaagtgttggcactgcccaagcctggt

SEQ ID NO: 6410 - DNA, 217 bp, Cricetulus griseus; identical to SEQ ID NO: 2768

SEQ ID NO: 6411 - DNA, 524 bp, Cricetulus griseus; identical to SEQ ID NO: 2769

SEQ ID NO: 6412 - DNA, 451 bp, Cricetulus griseus; identical to SEQ ID NO: 2770

SEQ ID NO: 6413 - DNA, 535 bp, Cricetulus griseus; identical to SEQ ID NO: 2771

SEQ ID NO: 6414 - DNA, 74 bp, Cricetulus griseus
ttctacaaactcttctaatcccaacattttcagcaaacgagcttatactattttatattttatttgaagccaca

SEQ ID NO: 6415 - DNA, 463 bp, Cricetulus griseus; identical to SEQ ID NO: 2773
  misc_feature (255)..(279): n is a, c, g, or t

SEQ ID NO: 6416 - DNA, 551 bp, Cricetulus griseus; identical to SEQ ID NO: 2774

SEQ ID NO: 6417 - DNA, 475 bp, Cricetulus griseus; identical to SEQ ID NO: 2775

SEQ ID NO: 6418 - DNA, 543 bp, Cricetulus griseus; identical to SEQ ID NO: 2776

SEQ ID NO: 6419 - DNA, 542 bp, Cricetulus griseus; identical to SEQ ID NO: 2777

SEQ ID NO: 6420 - DNA, 477 bp, Cricetulus griseus; identical to SEQ ID NO: 2778

SEQ ID NO: 6421 - DNA, 349 bp, Cricetulus griseus
accaccactgactggcttcttttcatcttttgaataaaacattacataagcctcattctgatgttcacactggctcctaaggactacacctttcttaactgtgtggaacttggggagggattatgggatacacagctgtccttcctgtaactttgggtgggaactaaaagttcaaatacaaaagacaagaattgtcaagagcaatgaatagaacagtgtgagtttattacaaaccttgtgatcacagctcatcatgtattccttattcctttcaggctttgaaccacaaacatattgggatcgaatgcaccttttccaggaagccattgcacacaggtttgtccattag

SEQ ID NO: 6422 - DNA, 500 bp, Cricetulus griseus; identical to SEQ ID NO: 2780

SEQ ID NO: 6423 - DNA, 528 bp, Cricetulus griseus; identical to SEQ ID NO: 2781

SEQ ID NO: 6424 - DNA, 491 bp, Cricetulus griseus; identical to SEQ ID NO: 2782

SEQ ID NO: 6425 - DNA, 299 bp, Cricetulus griseus
gtgttggttcagtttctagcagaccaagtactcccacactaggcacaccaactccacaaaccatgtctgtctcaactaaagtaggcactccaatgtccctcacaggacaaaggtttacagtacagatgcctgcttctcagtcccctgctgtgaaagcttcaattcccgcaacatcagcagttcagaatgttctgattaatccatcactaattgggtccaaaaacattcttattactactaatatggtatcccaaaatacagccaatgagtcagcaaatgccctgaaaagaaaacgtgaa

SEQ ID NO: 6426 - DNA, 552 bp, Cricetulus griseus; identical to SEQ ID NO: 2784

SEQ ID NO: 6427 - DNA, 418 bp, Cricetulus griseus; identical to SEQ ID NO: 2785

SEQ ID NO: 6428 - DNA, 457 bp, Cricetulus griseus; identical to SEQ ID NO: 2786
  misc_feature (152)..(170): n is a, c, g, or t
  misc_feature (273)..(298): n is a, c, g, or t

SEQ ID NO: 6429 - DNA, 522 bp, Cricetulus griseus; identical to SEQ ID NO: 2787
  misc_feature (255)..(298): n is a, c, g, or t

SEQ ID NO: 6430 - DNA, 497 bp, Cricetulus griseus; identical to SEQ ID NO: 2788

SEQ ID NO: 6431 - DNA, 467 bp, Cricetulus griseus; identical to SEQ ID NO: 2789

SEQ ID NO: 6432 - DNA, 424 bp, Cricetulus griseus; identical to SEQ ID NO: 2790

SEQ ID NO: 6433 - DNA, 351 bp, Cricetulus griseus; identical to SEQ ID NO: 2791

SEQ ID NO: 6434 - DNA, 417 bp, Cricetulus griseus
cttgatgctgttcccatcagaccactgaagaggacacttcccgttccctagtgaaagatcaccttttccagcaagagacagttgttaccagtgagccttatagaagctcagacataagacctttaccctttgaagatctgaatgccagaagagtctacttgcaaagcccagggaaccaggtaagaaaatgcatactattcatatgtatagcatatttagagaacctggtatgctacagaaaaacacaaagctctgtaaaagggcacagggatgtggaggatgagttttgtagacagggagggaatgtcttagttcagggtgttgtaatacaacatgaactgggtagctcaaacagcaggatttttgtttgtttgtgttatcctacagctctagcagttagactggctgtggtaaggg

SEQ ID NO: 6435 - DNA, 473 bp, Cricetulus griseus; identical to SEQ ID NO: 2793

SEQ ID NO: 6436 - DNA, 152 bp, Cricetulus griseus; identical to SEQ ID NO: 2794

SEQ ID NO: 6437 - DNA, 517 bp, Cricetulus griseus; identical to SEQ ID NO: 2795

SEQ ID NO: 6438 - DNA, 545 bp, Cricetulus griseus; identical to SEQ ID NO: 2796

SEQ ID NO: 6439 - DNA, 578 bp, Cricetulus griseus; identical to SEQ ID NO: 2797

SEQ ID NO: 6440 - DNA, 600 bp, Cricetulus griseus; identical to SEQ ID NO: 2798

SEQ ID NO: 6441 - DNA, 430 bp, Cricetulus griseus; identical to SEQ ID NO: 2799
  misc_feature (86)..(103): n is a, c, g, or t

SEQ ID NO: 6442 - DNA, 506 bp, Cricetulus griseus; identical to SEQ ID NO: 2800

SEQ ID NO: 6443 - DNA, 339 bp, Cricetulus griseus; identical to SEQ ID NO: 2801

SEQ ID NO: 6444 - DNA, 198 bp, Cricetulus griseus; identical to SEQ ID NO: 2802

SEQ ID NO: 6445 - DNA, 433 bp, Cricetulus griseus; identical to SEQ ID NO: 2803
  misc_feature (122)..(122): n is a, c, g, or t

SEQ ID NO: 6446 - DNA, 322 bp, Cricetulus griseus; identical to SEQ ID NO: 2804

SEQ ID NO: 6447 - DNA, 297 bp, Cricetulus griseus
aaggaaagaaagaattcggccttctttctcttctaatcttattccacggatctgattcaggccatgtcacaacacaaggctacataaaaacctcaagtggaggtcccagggtctgggggggtttaaatagggggtgatggaatgtttcggtaagggacccttttcttcaaatcctctcaaaggggaatttctaacagttccaacttaatgggctaacagctttgggggccttgcctctttcctaatctttagggcatgggagcccagcctccctaaccctaaaaccctgaaaatgga

SEQ ID NO: 6448 - DNA, 527 bp, Cricetulus griseus; identical to SEQ ID NO: 2806

SEQ ID NO: 6449 - DNA, 528 bp, Cricetulus griseus; identical to SEQ ID NO: 2807
  misc_feature (309)..(325): n is a, c, g, or t

SEQ ID NO: 6450 - DNA, 399 bp, Cricetulus griseus; identical to SEQ ID NO: 2808
  misc_feature (203)..(228): n is a, c, g, or t

SEQ ID NO: 6451 - DNA, 359 bp, Cricetulus griseus; identical to SEQ ID NO: 2809

SEQ ID NO: 6452 - DNA, 421 bp, Cricetulus griseus; identical to SEQ ID NO: 2810
  misc_feature (63)..(101): n is a, c, g, or t
  misc_feature (148)..(170): n is a, c, g, or t

SEQ ID NO: 6453 - DNA, 457 bp, Cricetulus griseus; identical to SEQ ID NO: 2811

SEQ ID NO: 6454 - DNA, 357 bp, Cricetulus griseus; identical to SEQ ID NO: 2812

SEQ ID NO: 6455 - DNA, 142 bp, Cricetulus griseus
gggacaccctgcagctggcgttcatcgacctcagacaagtaagatgtattgactccttccacttactgttctcttgccttattagtttatttttaatggtaccacaatgcttgtttgccctgaaaacccatctttggaagat

SEQ ID NO: 6456 - DNA, 323 bp, Cricetulus griseus; identical to SEQ ID NO: 2814

SEQ ID NO: 6457 - DNA, 528 bp, Cricetulus griseus; identical to SEQ ID NO: 2815

SEQ ID NO: 6458 - DNA, 291 bp, Cricetulus griseus; identical to SEQ ID NO: 2816

SEQ ID NO: 6459 - DNA, 355 bp, Cricetulus griseus; identical to SEQ ID NO: 2817

SEQ ID NO: 6460 - DNA, 294 bp, Cricetulus griseus; identical to SEQ ID NO: 2818

SEQ ID NO: 6461 - DNA, 495 bp, Cricetulus griseus; identical to SEQ ID NO: 2819

SEQ ID NO: 6462 - DNA, 360 bp, Cricetulus griseus; identical to SEQ ID NO: 2820
  misc_feature (58)..(73): n is a, c, g, or t
  misc_feature (75)..(88): n is a, c, g, or t

SEQ ID NO: 6463 - DNA, 313 bp, Cricetulus griseus; identical to SEQ ID NO: 2821

SEQ ID NO: 6464 - DNA, 578 bp, Cricetulus griseus; identical to SEQ ID NO: 2822
  misc_feature (468)..(494): n is a, c, g, or t

SEQ ID NO: 6465 - DNA, 579 bp, Cricetulus griseus; identical to SEQ ID NO: 2823

SEQ ID NO: 6466 - DNA, 600 bp, Cricetulus griseus; identical to SEQ ID NO: 2824

SEQ ID NO: 6467 - DNA, 581 bp, Cricetulus griseus; identical to SEQ ID NO: 2825

SEQ ID NO: 6468 - DNA, 581 bp, Cricetulus griseus; identical to SEQ ID NO: 2826

SEQ ID NO: 6469 - DNA, 567 bp, Cricetulus griseus; identical to SEQ ID NO: 2827

SEQ ID NO: 6470 - DNA, 579 bp, Cricetulus griseus; identical to SEQ ID NO: 2828
  misc_feature (292)..(306): n is a, c, g, or t

SEQ ID NO: 6471 - DNA, 510 bp, Cricetulus griseus; identical to SEQ ID NO: 2829

SEQ ID NO: 6472 - DNA, 569 bp, Cricetulus griseus; identical to SEQ ID NO: 2830

SEQ ID NO: 6473 - DNA, 422 bp, Cricetulus griseus; identical to SEQ ID NO: 2831

SEQ ID NO: 6474 - DNA, 580 bp, Cricetulus griseus; identical to SEQ ID NO: 2832

SEQ ID NO: 6475 - DNA, 580 bp, Cricetulus griseus; identical to SEQ ID NO: 2833

SEQ ID NO: 6476 - DNA, 579 bp, Cricetulus griseus; identical to SEQ ID NO: 2834

SEQ ID NO: 6477 - DNA, 580 bp, Cricetulus griseus; identical to SEQ ID NO: 2835
  misc_feature (442)..(460): n is a, c, g, or t

SEQ ID NO: 6478 - DNA, 579 bp, Cricetulus griseus; identical to SEQ ID NO: 2836

SEQ ID NO: 6479 - DNA, 96 bp, Cricetulus griseus
taccagtgttcttatatcactcaaggcaggcctggggcctgttagaccaaacacttcactacaggagactataggaaactttttaaggagagagat

SEQ ID NO: 6480 - DNA, 580 bp, Cricetulus griseus; identical to SEQ ID NO: 2838

SEQ ID NO: 6481 - DNA, 552 bp, Cricetulus griseus
  misc_feature (159)..(173): n is a, c, g, or t
tcttggctctgactggatggggttaccgggttatagctttgcagtatccagtttattgggaccatcttgaattctgtgatggattcagaaaacttttagaccacttacagttggataaagtccatctgtttggggcgtctttgggaggttttttggctnnnnnnnnnnnnnnntacactcacaagtctccaagagtccactccctcatcctctgcaatgccttcagtgacacatctatcttcaaccaaacgtggactgcaaacagcttttggctgatgccagcatttatgctcaagaaaatagttcttgggaacttttcctctggcccagtcgacccaatgatggcagatgccattgacttcatggtggacaggctagagagtttgggtcaaagtgaactggcttcaagactaactctgaattgtcaaaattcatatgtggaacctcataaaattcgggacatccctgtaaccatcatggatgtgtttgaccagagtgcattgtcaacggaagccaaggaagaaatgtacaaactgtaccctaatgcccgga

SEQ ID NO: 6482 - DNA, 579 bp, Cricetulus griseus; identical to SEQ ID NO: 2840

SEQ ID NO: 6483 - DNA, 567 bp, Cricetulus griseus; identical to SEQ ID NO: 2841
  misc_feature (65)..(82): n is a, c, g, or t

SEQ ID NO: 6484 - DNA, 579 bp, Cricetulus griseus; identical to SEQ ID NO: 2842

SEQ ID NO: 6485 - DNA, 175 bp, Cricetulus griseus; identical to SEQ ID NO: 2843

SEQ ID NO: 6486 - DNA, 418 bp, Cricetulus griseus; identical to SEQ ID NO: 2844

SEQ ID NO: 6487 - DNA, 188 bp, Cricetulus griseus; identical to SEQ ID NO: 2845

SEQ ID NO: 6488 - DNA, 368 bp, Cricetulus griseus; identical to SEQ ID NO: 2846
  misc_feature (193)..(193): n is a, c, g, or t
  misc_feature (198)..(198): n is a, c, g, or t

SEQ ID NO: 6489 - DNA, 486 bp, Cricetulus griseus; identical to SEQ ID NO: 2847

SEQ ID NO: 6490 - DNA, 579 bp, Cricetulus griseus; identical to SEQ ID NO: 2848

SEQ ID NO: 6491 - DNA, 401 bp, Cricetulus griseus
  misc_feature (276)..(302): n is a, c, g, or t
gccgccgcagaacctactcggacacagactcctctaatgatgttccccccgaagacccagagagacctcttcactgttcaggaaacacacttaatggagatttggcatcagcaaccattcctgaagaaagcagacttctggccaagacacaatctgaatctgaagaacctcttccatctttctcctgaggaaacggacacaccccgcctcctctgagtgttgctatgcaaaagctgctgtaattaaactctttctggggtagcttcccctctcctnnnnnnnnnnnnnnnnnnnnnnnnnnnttgtaaacaaacaacccacatacttttgaagtgtattttatctttctatagtttacttgcaagagtattttcctaataacttcacagtatggatgtgca

SEQ ID NO: 6492 - DNA, 579 bp, Cricetulus griseus; identical to SEQ ID NO: 2850

SEQ ID NO: 6493 - DNA, 579 bp, Cricetulus griseus; identical to SEQ ID NO: 2851

SEQ ID NO: 6494 - DNA, 463 bp, Cricetulus griseus; identical to SEQ ID NO: 2852
  misc_feature (50)..(62): n is a, c, g, or t
  misc_feature (65)..(79): n is a, c, g, or t

SEQ ID NO: 6495 - DNA, 579 bp, Cricetulus griseus; identical to SEQ ID NO: 2853
  misc_feature (232)..(246): n is a, c, g, or t

SEQ ID NO: 6496 - DNA, 570 bp, Cricetulus griseus; identical to SEQ ID NO: 2854

SEQ ID NO: 6497 - DNA, 578 bp, Cricetulus griseus; identical to SEQ ID NO: 2855
  misc_feature (26)..(26): n is a, c, g, or t

SEQ ID NO: 6498 - DNA, 303 bp, Cricetulus griseus; identical to SEQ ID NO: 2856

SEQ ID NO: 6499 - DNA, 577 bp, Cricetulus griseus; identical to SEQ ID NO: 2857

SEQ ID NO: 6500 - DNA, 300 bp, Cricetulus griseus; identical to SEQ ID NO: 2858
  misc_feature (150)..(150): n is a, c, g, or t

SEQ ID NO: 6501 - DNA, 578 bp, Cricetulus griseus; identical to SEQ ID NO: 2859

SEQ ID NO: 6502 - DNA, 580 bp, Cricetulus griseus; identical to SEQ ID NO: 2860
  misc_feature (339)..(356): n is a, c, g, or t
  misc_feature (387)..(404): n is a, c, g, or t

SEQ ID NO: 6503 - DNA, 580 bp, Cricetulus griseus; identical to SEQ ID NO: 2861

SEQ ID NO: 6504 - DNA, 578 bp, Cricetulus griseus; identical to SEQ ID NO: 2862

SEQ ID NO: 6505 - DNA, 201 bp, Cricetulus griseus; identical to SEQ ID NO: 2863

SEQ ID NO: 6506 - DNA, 138 bp, Cricetulus griseus; identical to SEQ ID NO: 2864

SEQ ID NO: 6507 - DNA, 577 bp, Cricetulus griseus; identical to SEQ ID NO: 2865

SEQ ID NO: 6508 - DNA, 578 bp, Cricetulus griseus; identical to SEQ ID NO: 2866
  misc_feature (512)..(512): n is a, c, g, or t

SEQ ID NO: 6509 - DNA, 283 bp, Cricetulus griseus; identical to SEQ ID NO: 2867
  misc_feature (62)..(79): n is a, c, g, or t

SEQ ID NO: 6510 - DNA, 579 bp, Cricetulus griseus; identical to SEQ ID NO: 2868

SEQ ID NO: 6511 - DNA, 580 bp, Cricetulus griseus; identical to SEQ ID NO: 2869
  misc_feature (270)..(321): n is a, c, g, or t
  misc_feature (381)..(381): n is a, c, g, or t
  misc_feature (488)..(488): n is a, c, g, or t

SEQ ID NO: 6512 - DNA, 567 bp, Cricetulus griseus
  misc_feature (76)..(76): n is a, c, g, or t
ttggatcccagcaacataaaaaggcttgacacttgaagggtcatagttccagtttgggactgggaatgtagctcanaagtgaagtgtgtgcttagcgtgtgtgaggccctcagttcaatcgctagcaccaattggccaattacatgtggaagtatgataagtaaactgacaaagggtttcttctcagctgatatgagaagaaaatggagtttatttggtaaggcaaggccatgtaccacattatatcagtttaatataatctagactgaagaattttaattaggtgaaatgttcactgtaactactaatagtgcaggaaatataattctgagagtttttctttacttttgcatttgatatgtttaaaacaaaactaaaattaaagcagtaagctaggtacagtggcaggtacctatagtctccgctatttatgaaactgaaatagaaagatcacttgcagcccagagttctgagcacagaaaacctcatttacaaacagataagcagtgctagagatacagcccagtgtcagtgctcacctagcacctagcatgggtttgattctca

SEQ ID NO: 6513 - DNA, 581 bp, Cricetulus griseus; identical to SEQ ID NO: 2871
  misc_feature (284)..(301): n is a, c, g, or t
  misc_feature (470)..(470): n is a, c, g, or t

SEQ ID NO: 6514 - DNA, 557 bp, Cricetulus griseus; identical to SEQ ID NO: 2872

SEQ ID NO: 6515 - DNA, 549 bp, Cricetulus griseus; identical to SEQ ID NO: 2873

SEQ ID NO: 6516 - DNA, 564 bp, Cricetulus griseus
  misc_feature (177)..(227): n is a, c, g, or t
gcgtgccatggtatatgtgaccctaaataaataaacctgggaggaacaagtattacattagatgatcacaaatcatcagtgagttctgcattttcaatctataagttcattctattgaaaaaagtgtggggtggagtcaaaatggtttagcaggtgaaggtactagctgctcagccnnnnnnnnnnnnnnnnnnnnnnnnnnnnnnnnnnnnnnnnnnnnnnnnnnnactccatgaattgtcctctgacctccaaacgcgtgccatggtatatgtgaccctaaataaataaacaaaagtgaaacacatgggaagtgctagagagatggttctgaagtcaaggacacatactcctttagagaggacctgagttcagttcccagcaccaacatcaggtgggctcacaaccacctgtagtaactctagctccaggaaatctgattcctctagccggcttgggcacctgtactcacatgtgcatagcccacccatgcacagacataattttttaaagtatttaaaaatatttttaaattgggtatggtagtgtacacttttaatccta

SEQ ID NO: 6517 - DNA, 577 bp, Cricetulus griseus
tccatgaggggtccaggtgaccctgagcctcagcttattgaaatggaggaggctgcatctccagcagcagttggagaggtcatgagggaaggtagtggagacagtgatgcagagagaagcagtgaatgtgaatttgcccagtataccacacatcatattctcaaatccttggcttccattgaagctcagtgcagtggtatgagctctgaaaagaaaaccgtgtttccctcttctgtggatagagtgaataccgccttgcagagagctcaaatgaaggtttgcagtctgtctggtcaacgagtagggcgtagcttaataaaatcaaaggatctgttgaaacaaaggtacttgcttgcaaaagctggctatcccctaagaaggtctcagtctttgccgaccaccttactgagcccagtaagggttgtgtcttctgtcaatgtacggctatctccaggaaaagagaccaggtgcagcccaccttccttcacctacaagtacacacctgaagaggaacaagaattggaaaagcaagtgactgaacaggatggtcagtctgtggttaaatctaccatcttca

SEQ ID NO: 6518 - DNA, 568 bp, Cricetulus griseus; identical to SEQ ID NO: 2876
  misc_feature (220)..(234): n is a, c, g, or t

SEQ ID NO: 6519 - DNA, 577 bp, Cricetulus griseus; identical to SEQ ID NO: 2877
  misc_feature (312)..(337): n is a, c, g, or t

SEQ ID NO: 6520 - DNA, 546 bp, Cricetulus griseus; identical to SEQ ID NO: 2878

SEQ ID NO: 6521 - DNA, 580 bp, Cricetulus griseus; identical to SEQ ID NO: 2879

SEQ ID NO: 6522 - DNA, 578 bp, Cricetulus griseus; identical to SEQ ID NO: 2880
  misc_feature (161)..(200): n is a, c, g, or t

SEQ ID NO: 6523 - DNA, 518 bp, Cricetulus griseus; identical to SEQ ID NO: 2881

SEQ ID NO: 6524 - DNA, 578 bp, Cricetulus griseus; identical to SEQ ID NO: 2882

SEQ ID NO: 6525 - DNA, 580 bp, Cricetulus griseus; identical to SEQ ID NO: 2883
  misc_feature (491)..(491): n is a, c, g, or t
  misc_feature (512)..(512): n is a, c, g, or t
  misc_feature (516)..(516): n is a, c, g, or t
  misc_feature (548)..(548): n is a, c, g, or t

SEQ ID NO: 6526 - DNA, 580 bp, Cricetulus griseus; identical to SEQ ID NO: 2884
  misc_feature (127)..(142): n is a, c, g, or t

SEQ ID NO: 6527 - DNA, 410 bp, Cricetulus griseus; identical to SEQ ID NO: 2885
  misc_feature (223)..(223): n is a, c, g, or t

SEQ ID NO: 6528 - DNA, 511 bp, Cricetulus griseus; identical to SEQ ID NO: 2886

SEQ ID NO: 6529 - DNA, 579 bp, Cricetulus griseus; identical to SEQ ID NO: 2887

SEQ ID NO: 6530 - DNA, 566 bp, Cricetulus griseus; identical to SEQ ID NO: 2888

SEQ ID NO: 6531 - DNA, 476 bp, Cricetulus griseus; identical to SEQ ID NO: 2889
  misc_feature (157)..(251): n is a, c, g, or t

SEQ ID NO: 6532 - DNA, 571 bp, Cricetulus griseus
aactccatatgtataccaaactagccttgaactcacttgctaggattaaaacatttaccaccacgcccagctctctgctctgtcctagaattcaagaaattgctttaacggtggggggcttaaaaagaaagccaagacagtgtgagtggacatactcacttctgggattcagagaacatttttaaaattcagatttttagcatgatacaaactaatgttctttcctctgagttgaaggagaaattaactatcaatctcttaaatccaaagctggataataagtaaaagaacctttccctttgttgggtataagacttctttctcctgctgtatcaagtgagaccattttgattggaagccatagcagctcagcaagtaaccagaatgctggcccaactccagacatgctgttttcctcaaatactaatgtgcagttgcaaaccttaatttctataatgtgttctaaaacgtgtggaccgagtagaccagctgcactacttttccttaaagcattcctagcacatggcccacagaccttggaagaaaaaaaattcctgtgtacagaccctgc

SEQ ID NO: 6533 - DNA, 191 bp, Cricetulus griseus; identical to SEQ ID NO: 2891

SEQ ID NO: 6534 - DNA, 567 bp, Cricetulus griseus; identical to SEQ ID NO: 2892
  misc_feature (208)..(236): n is a, c, g, or t
  misc_feature (259)..(278): n is a, c, g, or t

SEQ ID NO: 6535 - DNA, 579 bp, Cricetulus griseus; identical to SEQ ID NO: 2893
  misc_feature (354)..(354): n is a, c, g, or t

SEQ ID NO: 6536 - DNA, 579 bp, Cricetulus griseus; identical to SEQ ID NO: 2894
  misc_feature (421)..(437): n is a, c, g, or t

SEQ ID NO: 6537 - DNA, 544 bp, Cricetulus griseus
  misc_feature (100)..(128): n is a, c, g, or t
ttcccaggatggtcaaggcaaaggagatgatgtaattgtaattgacagtgatgatgaagatgacgatgaagaaaatgatggagaacatgaagattatgannnnnnnnnnnnnnnnnnnnnnnnnnnnngaagatgacacggggatgggagatgagggtgaagatagtaatgaaggaactggtagtgcagatggtaatgatggatatgaagctgatgatgctgagggtggtgatgggactgatccaggtacagaaacagaagaaagtatgggcggagctgaaagtaatcagagagctgctgattctcaaaacaatggcgaaggaagtacaagtgcagcagaatcatctttctctcaggaggttgctcgagaacagcagcccacatcagcatctgagagacagaccccacgagcaccccaatcaccaaggcgcccaccacatcctcttcccccacgcctgaccattcacgctccacctcaggagttgggaccaccagttcagagaattcagatgacccggaggcagtctgtagggcgtggacttca

SEQ ID NO: 6538 - DNA, 424 bp, Cricetulus griseus
tactattgcttatttttgaaagccagaagatgactttggagaactctggttcttccaccttgcttttgagacagagtctgttttagcttctatactgactaagccagctggcttgcgggtgttctgggtgtgtcttctttgtctgctgccccttccactgtggaattgcttaaattaagatagccactacatctggcattttttacttgttggttctggtgatccaactgatcagctgtgagtggcaaatcacttctatcaattgaatcattgaactagctgtcatattgtagtttttgtgtgtgtgacacagcctagattgaccagactcaggcaatgctttttccttagctattctagtgctgggattataggtggttctagattggaacccagagcctatactaactagtaaagtgttatt

SEQ ID NO: 6539 - DNA, 582 bp, Cricetulus griseus; identical to SEQ ID NO: 2897

SEQ ID NO: 6540 - DNA, 352 bp, Cricetulus griseus; identical to SEQ ID NO: 2898
  misc_feature (152)..(202): n is a, c, g, or t

SEQ ID NO: 6541 - DNA, 566 bp, Cricetulus griseus; identical to SEQ ID NO: 2899

SEQ ID NO: 6542 - DNA, 414 bp, Cricetulus griseus
  misc_feature (207)..(234): n is a, c, g, or t
gtgtgtgggatctgtgtgtcagagtgtatggtagcaggtaaattgagagcaaggagaagtggtgttggaaatttgaggtatttggtcctagtttattagatgtggggattgaggttttcagtatatggcttttgacttcagaagttgatcttgacttgaagtgttttgttgatttacaaatttgtttttactctttgacagatcttnnnnnnnnnnnnnnnnnnnnnnnnnnnncaagtcatttagttttggtaatcaagtctttatgagaacttagctcctcatatgcccatatggtattatctgtcttagtgctaggtaggaataaattattaatttttacttgtagcccccataatgagcaagatttagtgagggtatgacacttattgcatataattaacttgtaccagg

SEQ ID NO: 6543 - DNA, 557 bp, Cricetulus griseus
  misc_feature (28)..(46): n is a, c, g, or t
aaagtcacaagcatccatgaaagagatnnnnnnnnnnnnnnnnnnnggatgtgtgaaatttatcagtaagtgttaagtcacgagagagacttctcagcaaataaagctgcgatctatccatttgatgtgaagaggcaaactaaagtgtttaacttggtagacagaacaaacacctgccatacactcagaccttgggttccatccctagcaccccaaaacaaaatcaatatcttggcaacatttagcttctcctgaagtgagttattgccaatggaatgctttggaaatctccattatgttcataggaatgtgccccacacactgacaggagtgtgcaaattagcaacgcttacacagaaagcctgtgaagacactggtctgactcctacgacatgtccctgacccacaaataaaaggcgggaggaggtgctaatagattctttcaaccacttataaatctcctcaaaactatttctagtcaatcattaaaggcattttgtattgaaaaattgtgatagaaatatcaacaattaaagttagaaaagaggccaagaaaa

SEQ ID NO: 6544 - DNA, 578 bp, Cricetulus griseus; identical to SEQ ID NO: 2902

SEQ ID NO: 6545 - DNA, 488 bp, Cricetulus griseus; identical to SEQ ID NO: 2903

SEQ ID NO: 6546 - DNA, 493 bp, Cricetulus griseus
cctaatatatttttcagttcctgtttttggttgtttctgaacttgacctatgggtaacaggggaataatgtgtttagatttaaaagagagaccaagaaagctttcatttcctgctagtcactcttctagactggccttttcagtcatagcagtctgtctatacacaggtgtgtgtgtgtgtggatggtgtctgtgcccgaggagaaatcctgtcaatggagccagctgcgaattgacttttcctgtaaggtccctggattgcatgcagctggggtggttaagatcatatgtgttgattgtatagaatgtttttcaaagatcccttcagtatggattggtcctgcaatggaagtgtaactcaagagtcctggctcatacttgttctttggcattccacctcaacatgcatgtgtgtttcaataaagctttatcacttgagtgtttacactttgagttctgcatatgctttagtctttgatgccctgacttattg

SEQ ID NO: 6547 - DNA, 551 bp, Cricetulus griseus
  misc_feature (523)..(523): n is a, c, g, or t
tacatcaacttagagggaacaagaaggccagaaatacattttcaaagcatatagaacaactcaaacaggaacactataagaaaaaggaggagaagaatatataagtactttaccaagggcttttaatactctcttgcctgatctagaagagattgaacatttgaattggttggaagctttgaagttaatggaaaagagagcagatttccagttatgttttgtggtgctagaaaaaacaccttgggatgaaactgaccatatagacaaaattaatgatagacggatcccatttgacctcctgagcactttagaagcagaaaaggtctatcagaaccatgtacaacatctgatatcagagaaaagaagaatagaaatgaaggagaaattcaagaagactttagaaaaaattcagttcatctcacctgggcaaccatgggaggaagttatgtgttttgttatggaggatgaagcattcaaatacatcactgaggctgatagcaaagaagtatatggtaggcatcancgagagatagttgaaaaagccaaagaag

SEQ ID NO: 6548 - DNA, 578 bp, Cricetulus griseus; identical to SEQ ID NO: 2906

SEQ ID NO: 6549 - DNA, 450 bp, Cricetulus griseus; identical to SEQ ID NO: 2907
  misc_feature (406)..(406): n is a, c, g, or t

SEQ ID NO: 6550 - DNA, 579 bp, Cricetulus griseus; identical to SEQ ID NO: 2908

SEQ ID NO: 6551 - DNA, 81 bp, Cricetulus griseus; identical to SEQ ID NO: 2909
  misc_feature (28)..(28): n is a, c, g, or t

SEQ ID NO: 6552 - DNA, 579 bp, Cricetulus griseus; identical to SEQ ID NO: 2910

SEQ ID NO: 6553 - DNA, 578 bp, Cricetulus griseus; identical to SEQ ID NO: 2911
  misc_feature (422)..(442): n is a, c, g, or t

SEQ ID NO: 6554 - DNA, 535 bp, Cricetulus griseus; identical to SEQ ID NO: 2912
  misc_feature (126)..(126): n is a, c, g, or t

SEQ ID NO: 6555 - DNA, 458 bp, Cricetulus griseus; identical to SEQ ID NO: 2913
  misc_feature (29)..(53): n is a, c, g, or t
  misc_feature (78)..(95): n is a, c, g, or t

SEQ ID NO: 6556 - DNA, 374 bp, Cricetulus griseus
acgcccagctgatgccgctatttttaagagatacttttgtttattctgtagaagaatactcagattaacctattatgtaagaaaatccaaacacgcgtggtatttgctctaaatgatagaaatgctgtaaatcctgtgcagtctatccagttagcctgagtgtaaggtttttgctattagttttacgctgtggctgtcctaatggtctcctgccatcagtctttacattctttgctttcatctttgaagcctctgtacagaaggttttttttctatccatcccttgatcttacacccctaactactgctcaatcttcataatccatctttttgaaatttagcagatgtgtgctcctacttttcttcctcatttt

SEQ ID NO: 6557 - DNA, 580 bp, Cricetulus griseus; identical to SEQ ID NO: 2915
  misc_feature (141)..(161): n is a, c, g, or t
  misc_feature (164)..(176): n is a, c, g, or t
  misc_feature (253)..(271): n is a, c, g, or t
  misc_feature (401)..(418): n is a, c, g, or t

SEQ ID NO: 6558 - DNA, 579 bp, Cricetulus griseus; identical to SEQ ID NO: 2916

SEQ ID NO: 6559 - DNA, 579 bp, Cricetulus griseus; identical to SEQ ID NO: 2917
  misc_feature (286)..(337): n is a, c, g, or t
  misc_feature (339)..(352): n is a, c, g, or t
  misc_feature (384)..(403): n is a, c, g, or t
  misc_feature (406)..(439): n is a, c, g, or t

SEQ ID NO: 6560 - DNA, 490 bp, Cricetulus griseus; identical to SEQ ID NO: 2918
  misc_feature (217)..(233): n is a, c, g, or t

SEQ ID NO: 6561 - DNA, 578 bp, Cricetulus griseus; identical to SEQ ID NO: 2919

SEQ ID NO: 6562 - DNA, 459 bp, Cricetulus griseus; identical to SEQ ID NO: 2920

SEQ ID NO: 6563 - DNA, 529 bp, Cricetulus griseus; identical to SEQ ID NO: 2921

SEQ ID NO: 6564 - DNA, 572 bp, Cricetulus griseus; identical to SEQ ID NO: 2922

SEQ ID NO: 6565 - DNA, 572 bp, Cricetulus griseus
aaaaaaaatgttcattgtaaggtacattatcacaaaagaaactgaaaatatgtacacaaatataaaagttacagaaatattatctttattaagaagacataaataagttgctgggcagtgatgatgcatgaatttggcaggcagatctcagggagtttgaggcctgcctggtctatatagtgagttctaggatagccagggctacacagcaagaagataatgatgacaatgacaacaaaagctccaatctcacagggaggacagggtgagaacttaccatgaaataacatcctttcatttgcatggttgtggttttcttcagaaacttctttcctccggtgcgtgtatctttcccataattttttgttacaaaccttctgaatctaaacacaaaaaaaataaaagtcagcactaagtcaccactgaaatcccccagacatgctaaattttgtacagactttatcagactcaaaatacataaacaaggcagctggagagatggctcggtggttaagagcagtcactgcttttccagaggacctgggttcaattcccagcacccacatggcagc

SEQ ID NO: 6566 - DNA, 530 bp, Cricetulus griseus; identical to SEQ ID NO: 2924
  misc_feature (499)..(499): n is a, c, g, or t

SEQ ID NO: 6567 - DNA, 287 bp, Cricetulus griseus
  misc_feature (28)..(81): n is a, c, g, or t
  misc_feature (105)..(152): n is a, c, g, or t
tgccggctgctgcccgtgctggtgccannnnnnnnnnnnnnnnnnnnnnnnnnnnnnnnnnnnnnnnnnnnnnnnnnnnnnaagacctctttcttccaggctttnnnnnnnnnnnnnnnnnnnnnnnnnnnnnnnnnnnnnnnnnnnnnnnnatgtgcagctgataaaaactggagacaaagtaggagccagtgaagccacactgctgaacatgctcaacatctcccccttctcctttgggctgatcatccagcaagtgtttgacaatggcagcatttacaacccag

SEQ ID NO: 6568 - DNA, 557 bp, Cricetulus griseus; identical to SEQ ID NO: 2926

SEQ ID NO: 6569 - DNA, 494 bp, Cricetulus griseus
ggtgggacagaggtacaacgaagtgatggccacctatctgcttttaggctacaagagctttgagctggaaggtgacaccatcactttgaagccccggccttcagctgatttgaccaacagtagtgccccatctccatcccacaaggttcagcgcagtgtttctgccaaccctaagcagcgacgctccagcgaccaggccgtccctgccattcccacctcaaattcctactttaagaagacccagagtaacaatgcagaaaataagcggcctgaggatgaggcggggcggaaagccagcagcaccgccaaagtgcctgccagccctttgcctggggtagagaggaagaagaccactcctaccccctccacaaacaacgtcctttccaccagcacaaaccgaagcaggaactccccacttttggacagggctagccttggccagtcctctatccagaatggtaaagacagcacagccccccagggtgtccctgtcg

SEQ ID NO: 6570 - DNA, 522 bp, Cricetulus griseus; identical to SEQ ID NO: 2928

SEQ ID NO: 6571 - DNA, 502 bp, Cricetulus griseus; identical to SEQ ID NO: 2929

SEQ ID NO: 6572 - DNA, 567 bp, Cricetulus griseus; identical to SEQ ID NO: 2930

SEQ ID NO: 6573 - DNA, 438 bp, Cricetulus griseus; identical to SEQ ID NO: 2931
  misc_feature (382)..(382): n is a, c, g, or t

SEQ ID NO: 6574 - DNA, 519 bp, Cricetulus griseus; identical to SEQ ID NO: 2932

SEQ ID NO: 6575 - DNA, 540 bp, Cricetulus griseus; identical to SEQ ID NO: 2933

SEQ ID NO: 6576 - DNA, 578 bp, Cricetulus griseus; identical to SEQ ID NO: 2934

SEQ ID NO: 6577 - DNA, 574 bp, Cricetulus griseus; identical to SEQ ID NO: 2935

SEQ ID NO: 6578 - DNA, 499 bp, Cricetulus griseus; identical to SEQ ID NO: 2936

SEQ ID NO: 6579 - DNA, 500 bp, Cricetulus griseus; identical to SEQ ID NO: 2937
  misc_feature (348)..(378): n is a, c, g, or t

SEQ ID NO: 6580 - DNA, 278 bp, Cricetulus griseus
ctctcacatactgccttgaacagtgtgggagtgttctggagctgttaaaacaatatcagaattttaaaaacaacttgacagctttgattcaaaaagaagagggtatcatctcccagcaggcttcctacatgggaagggacaacctgaagaagaaggtagcagagattgaaactgtcaaagaagaattcaatgaacatttagaagttgtggacaagataaatcagatttgtaaaaatctacaatatcatctaaataaaatgaaaacctttgaagagccc

SEQ ID NO: 6581 - DNA, 479 bp, Cricetulus griseus; identical to SEQ ID NO: 2939

SEQ ID NO: 6582 - DNA, 502 bp, Cricetulus griseus; identical to SEQ ID NO: 2940

SEQ ID NO: 6583 - DNA, 539 bp, Cricetulus griseus; identical to SEQ ID NO: 2941

SEQ ID NO: 6584 - DNA, 501 bp, Cricetulus griseus; identical to SEQ ID NO: 2942

SEQ ID NO: 6585 - DNA, 395 bp, Cricetulus griseus; identical to SEQ ID NO: 2943

SEQ ID NO: 6586 - DNA, 234 bp, Cricetulus griseus
cgggggggaaccccagttttttttccctttaagaagggttaatttcccccctggggtaaaaaaggaaaataatgttttccgtggaaaattttttcaccctcaaatatcctttgggataggacctacctccccccactgtttctaagctgagggagtatccctctatgtgaaataagctcccaaagcccattcctatgctaagaataagtactgatctactacaagaagccctat

SEQ ID NO: 6587 - DNA, 247 bp, Cricetulus griseus; identical to SEQ ID NO: 2945

SEQ ID NO: 6588 - DNA, 487 bp, Cricetulus griseus; identical to SEQ ID NO: 2946

SEQ ID NO: 6589 - DNA, 579 bp, Cricetulus griseus; identical to SEQ ID NO: 2947
  misc_feature (434)..(456): n is a, c, g, or t

SEQ ID NO: 6590 - DNA, 517 bp, Cricetulus griseus; identical to SEQ ID NO: 2948

SEQ ID NO: 6591 - DNA, 146 bp, Cricetulus griseus; identical to SEQ ID NO: 2949

SEQ ID NO: 6592 - DNA, 540 bp, Cricetulus griseus
  misc_feature (229)..(247): n is a, c, g, or t
tagctcgcgcgtccgccgggatgagctacgaccgcgccatcaccgtcttctcgcccgacggccacctcttccaagtggagtacgcgcaggaggcggtcaagaagggctccactgcggttggtgttcgaggaaaggacattgttgttcttggtgtggaaaaaaaatcggtggccaagctacaagatgaaagaacagtacggaagatctgtgctttggacgataatgtctnnnnnnnnnnnnnnnnnnncactgccgatgcaaggatagtcatcaacagagcccgggtggagtgccagagccaccggctcaccgtggaggaccccgttactgtggagtacatcacccgatacattgccagtctgaagcagcgctatacacagagcaatgggcgcaggccatttggcatctctgccctcattgtgggatttgactttgatggcacccccagactctatcagactgacccctcatgcacataccatgcctggaaggccaatgccataggccggggcgccaagtcggtgcgtgaattcctggaga

SEQ ID NO: 6593 - DNA, 526 bp, Cricetulus griseus; identical to SEQ ID NO: 2951

SEQ ID NO: 6594 - DNA, 325 bp, Cricetulus griseus; identical to SEQ ID NO: 2952

SEQ ID NO: 6595 - DNA, 579 bp, Cricetulus griseus; identical to SEQ ID NO: 2953

SEQ ID NO: 6596 - DNA, 368 bp, Cricetulus griseus; identical to SEQ ID NO: 2954

SEQ ID NO: 6597 - DNA, 505 bp, Cricetulus griseus; identical to SEQ ID NO: 2955
  misc_feature (398)..(416): n is a, c, g, or t

SEQ ID NO: 6598 - DNA, 432 bp, Cricetulus griseus; identical to SEQ ID NO: 2956

SEQ ID NO: 6599 - DNA, 540 bp, Cricetulus griseus; identical to SEQ ID NO: 2957

SEQ ID NO: 6600 - DNA, 457 bp, Cricetulus griseus; identical to SEQ ID NO: 2958

SEQ ID NO: 6601 - DNA, 83 bp, Cricetulus griseus; identical to SEQ ID NO: 2959

SEQ ID NO: 6602 - DNA, 472 bp, Cricetulus griseus; identical to SEQ ID NO: 2960

SEQ ID NO: 6603 - DNA, 514 bp, Cricetulus griseus; identical to SEQ ID NO: 2961
  misc_feature (191)..(209): n is a, c, g, or t

SEQ ID NO: 6604 - DNA, 427 bp, Cricetulus griseus; identical to SEQ ID NO: 2962

SEQ ID NO: 6605 - DNA, 554 bp, Cricetulus griseus; identical to SEQ ID NO: 2963

SEQ ID NO: 6606 - DNA, 280 bp, Cricetulus griseus; identical to SEQ ID NO: 2964

SEQ ID NO: 6607 - DNA, 345 bp, Cricetulus griseus; identical to SEQ ID NO: 2965

SEQ ID NO: 6608 - DNA, 522 bp, Cricetulus griseus; identical to SEQ ID NO: 2966

SEQ ID NO: 6609 - DNA, 304 bp, Cricetulus griseus; identical to SEQ ID NO: 2967

SEQ ID NO: 6610 - DNA, 329 bp, Cricetulus griseus; identical to SEQ ID NO: 2968
  misc_feature (213)..(231): n is a, c, g, or t

SEQ ID NO: 6611 - DNA, 427 bp, Cricetulus griseus; identical to SEQ ID NO: 2969

SEQ ID NO: 6612 - DNA, 540 bp, Cricetulus griseus; identical to SEQ ID NO: 2970

SEQ ID NO: 6613 - DNA, 521 bp, Cricetulus griseus; identical to SEQ ID NO: 2971

SEQ ID NO: 6614 - DNA, 446 bp, Cricetulus griseus; identical to SEQ ID NO: 2972
  misc_feature (305)..(305): n is a, c, g, or t

SEQ ID NO: 6615 - DNA, 549 bp, Cricetulus griseus; identical to SEQ ID NO: 2973
  misc_feature (241)..(289): n is a, c, g, or t

SEQ ID NO: 6616 - DNA, 580 bp, Cricetulus griseus; identical to SEQ ID NO: 2974

SEQ ID NO: 6617 - DNA, 560 bp, Cricetulus griseus; identical to SEQ ID NO: 2975

SEQ ID NO: 6618 - DNA, 539 bp, Cricetulus griseus; identical to SEQ ID NO: 2976

SEQ ID NO: 6619 - DNA, 498 bp, Cricetulus griseus; identical to SEQ ID NO: 2977

SEQ ID NO: 6620 - DNA, 333 bp, Cricetulus griseus
cagagatctgcctttgcctctgagtgctgggattaaaggcatgcaccaccaacacctgcaggaaccattttaatttgggtaaattacaatgtttcttttttcttccagtgtgctgtaagaaaccataccagttcaaacttacagaaacttactcctatgtcttcattgaagagttttataattttatctcccatccataggcttgggcttgctttcaaaataattttatatatcttatttgtagccatatttcaagttattagttaaatataaataacagaacttagcatcttaaagtgtataggtcagtagtgttgagtgcattcacactgt

SEQ ID NO: 6621 - DNA, 219 bp, Cricetulus griseus
gacaggccactggaaacaggagagaggagaaaggaatgagggggagggagaggagggatcagagagaggcgggggggagagagaggatgggaggtgggcagaacccttttaaaagggaacatagtaaatgtgcacaggtggtgctcttagtggctgcagctcctgtcagaaccccaagggcagtccagtacagatgcctgaacactaacatcgagggct

SEQ ID NO: 6622 - DNA, 579 bp, Cricetulus griseus; identical to SEQ ID NO: 2980

SEQ ID NO: 6623 - DNA, 292 bp, Cricetulus griseus; identical to SEQ ID NO: 2981

SEQ ID NO: 6624 - DNA, 278 bp, Cricetulus griseus; identical to SEQ ID NO: 2982

SEQ ID NO: 6625 - DNA, 482 bp, Cricetulus griseus; identical to SEQ ID NO: 2983
  misc_feature (418)..(446): n is a, c, g, or t

SEQ ID NO: 6626 - DNA, 560 bp, Cricetulus griseus
cttcattatttgatgcaaaggagcggactgtcacctttataagtgggaagaagtacagtgtggatcacctgcactcaatgggagcaggggatctgctcagttctatgtttgagtttagtgagaagctgaacgctctccagctcagtgatgaggagatgagcttgttcacagcagttgttctggtatctgcagatcggtctggaattgaaaatgtcaactcggtggaagctttgcaagaaacgctcatccgtgcattaaggactttaatcatgaaaaaccacccaaatgaggcctccatttttacaaaattacttctaaagttgccagatcttcgatctttaaacaatatgcactctgaggagctcttggcctttaaagttcacccataaggccttggaacttgaactgatgcagctgtacattatgtgctaagatgcttatttatatgtgtataccatatgtggaattagaaaagaccttagacagtgccaggtcctgggctgtctctgtagtcagttaccagtagctgtttggatgagaactcattgccatgttagaca

SEQ ID NO: 6627 - DNA, 487 bp, Cricetulus griseus; identical to SEQ ID NO: 2985

SEQ ID NO: 6628 - DNA, 459 bp, Cricetulus griseus; identical to SEQ ID NO: 2986

SEQ ID NO: 6629 - DNA, 362 bp, Cricetulus griseus; identical to SEQ ID NO: 2987

SEQ ID NO: 6630 - DNA, 463 bp, Cricetulus griseus; identical to SEQ ID NO: 2988

SEQ ID NO: 6631 - DNA, 410 bp, Cricetulus griseus; identical to SEQ ID NO: 2989

SEQ ID NO: 6632 - DNA, 487 bp, Cricetulus griseus; identical to SEQ ID NO: 2990
  misc_feature (287)..(315): n is a, c, g, or t

SEQ ID NO: 6633 - DNA, 581 bp, Cricetulus griseus; identical to SEQ ID NO: 2991

SEQ ID NO: 6634 - DNA, 347 bp, Cricetulus griseus; identical to SEQ ID NO: 2992

SEQ ID NO: 6635 - DNA, 347 bp, Cricetulus griseus
gcgccacacgcttacgccccgcccctccggccgcaaagagagccttccgcggatgcgcgctgcggtgaggtgcgccgtggctggcaaaagggttctcctcctgtaggcggttaaagcgcttccgggcggaagaagaagatggagttgagggaaagatactggggtttgagacgcaggattcccggttgtggtgaggtagtttctggtcacaggagtagattccttcttggctgtgtgtgccagctttcatttgtgccacgtcaacgcagttctcgcattggtcccggctttactattatctcctatccatttttcgcgtcccccctctctctagagaagagagagag

SEQ ID NO: 6636 - DNA, 525 bp, Cricetulus griseus; identical to SEQ ID NO: 2994

SEQ ID NO: 6637 - DNA, 536 bp, Cricetulus griseus; identical to SEQ ID NO: 2995

SEQ ID NO: 6638 - DNA, 579 bp, Cricetulus griseus; identical to SEQ ID NO: 2996

SEQ ID NO: 6639 - DNA, 541 bp, Cricetulus griseus; identical to SEQ ID NO: 2997

SEQ ID NO: 6640 - DNA, 522 bp, Cricetulus griseus; identical to SEQ ID NO: 2998

SEQ ID NO: 6641 - DNA, 533 bp, Cricetulus griseus; identical to SEQ ID NO: 2999

SEQ ID NO: 6642 - DNA, 569 bp, Cricetulus griseus; identical to SEQ ID NO: 3000

SEQ ID NO: 6643 - DNA, 335 bp, Cricetulus griseus; identical to SEQ ID NO: 3001
  misc_feature (175)..(194): n is a, c, g, or t

SEQ ID NO: 6644 - DNA, 542 bp, Cricetulus griseus; identical to SEQ ID NO: 3002

SEQ ID NO: 6645 - DNA, 483 bp, Cricetulus griseus; identical to SEQ ID NO: 3003

SEQ ID NO: 6646 - DNA, 218 bp, Cricetulus griseus; identical to SEQ ID NO: 3004

SEQ ID NO: 6647 - DNA, 381 bp, Cricetulus griseus
  misc_feature (175)..(201): n is a, c, g, or t
  misc_feature (203)..(215): n is a, c, g, or t
  misc_feature (217)..(240): n is a, c, g, or t
taacatgtaaaaagacaagtatgatagtggctactgtaatcgaagccagcactaaggtgatggagatgggtaaatctatggagtttactggcaagtcagcttaacctacttggcaagctttgagccagtctctttttggtttggttttggtttttcaagacatgttttcagcacnnnnnnnnnnnnnnnnnnnnnnnnnnnannnnnnnnnnnnntnnnnnnnnnnnnnnnnnnnnnnnntgccaccaccacctggccagactgtctcaagcaaacaaggtagatggcatctaaggaacaccagctgaagttgacgcctggcttccacatgcacaagcagcatgcatgatgggacatgtgcgcacacacacatgaactcaa

SEQ ID NO: 6648 - DNA, 527 bp, Cricetulus griseus; identical to SEQ ID NO: 3006

SEQ ID NO: 6649 - DNA, 192 bp, Cricetulus griseus; identical to SEQ ID NO: 3007

SEQ ID NO: 6650 - DNA, 363 bp, Cricetulus griseus; identical to SEQ ID NO: 3008

SEQ ID NO: 6651 - DNA, 539 bp, Cricetulus griseus; identical to SEQ ID NO: 3009

SEQ ID NO: 6652 - DNA, 235 bp, Cricetulus griseus; identical to SEQ ID NO: 3010

SEQ ID NO: 6653 - DNA, 483 bp, Cricetulus griseus; identical to SEQ ID NO: 3011
  misc_feature (430)..(430): n is a, c, g, or t

SEQ ID NO: 6654 - DNA, 567 bp, Cricetulus griseus; identical to SEQ ID NO: 3012

SEQ ID NO: 6655 - DNA, 267 bp, Cricetulus griseus
aaaaaagtttgggttttccggaaccccctttggaaaataatgctaccccaaaattaaaaaaaataccctgcctttgctccggataagggggttaaacagtttggcccaccccccctggggccacccaggggcccaaggggggggccctgtctaaaaaaattaaatttttttattaaaacacaaccaaaaaagccacttggcccattgaaatagggcacatgcgggctgacccccaaaggggggggggcccttggaaaaaaaacccct

SEQ ID NO: 6656 - DNA, 457 bp, Cricetulus griseus; identical to SEQ ID NO: 3014
  misc_feature (351)..(351): n is a, c, g, or t

SEQ ID NO: 6657 - DNA, 497 bp, Cricetulus griseus; identical to SEQ ID NO: 3015

SEQ ID NO: 6658 - DNA, 401 bp, Cricetulus griseus; identical to SEQ ID NO: 3016

SEQ ID NO: 6659 - DNA, 471 bp, Cricetulus griseus; identical to SEQ ID NO: 3017

SEQ ID NO: 6660 - DNA, 137 bp, Cricetulus griseus; identical to SEQ ID NO: 3018

SEQ ID NO: 6661 - DNA, 445 bp, Cricetulus griseus; identical to SEQ ID NO: 3019

SEQ ID NO: 6662 - DNA, 501 bp, Cricetulus griseus; identical to SEQ ID NO: 3020

SEQ ID NO: 6663 - DNA, 167 bp, Cricetulus griseus; identical to SEQ ID NO: 3021

SEQ ID NO: 6664 - DNA, 445 bp, Cricetulus griseus; identical to SEQ ID NO: 3022

SEQ ID NO: 6665 - DNA, 550 bp, Cricetulus griseus; identical to SEQ ID NO: 3023

SEQ ID NO: 6666 - DNA, 540 bp, Cricetulus griseus; identical to SEQ ID NO: 3024

SEQ ID NO: 6667 - DNA, 406 bp, Cricetulus griseus; identical to SEQ ID NO: 3025

SEQ ID NO: 6668 - DNA, 463 bp, Cricetulus griseus; identical to SEQ ID NO: 3026

SEQ ID NO: 6669 - DNA, 343 bp, Cricetulus griseus; identical to SEQ ID NO: 3027
  misc_feature (50)..(68): n is a, c, g, or t
  misc_feature (79)..(101): n is a, c, g, or t

SEQ ID NO: 6670 - DNA, 513 bp, Cricetulus griseus; identical to SEQ ID NO: 3028

SEQ ID NO: 6671 - DNA, 326 bp, Cricetulus griseus; identical to SEQ ID NO: 3029

SEQ ID NO: 6672 - DNA, 487 bp, Cricetulus griseus; identical to SEQ ID NO: 3030

SEQ ID NO: 6673 - DNA, 438 bp, Cricetulus griseus; identical to SEQ ID NO: 3031

SEQ ID NO: 6674 - DNA, 467 bp, Cricetulus griseus; identical to SEQ ID NO: 3032
  misc_feature (285)..(313): n is a, c, g, or t

SEQ ID NO: 6675 - DNA, 413 bp, Cricetulus griseus; identical to SEQ ID NO: 3033

SEQ ID NO: 6676 - DNA, 392 bp, Cricetulus griseus; identical to SEQ ID NO: 3034

SEQ ID NO: 6677 - DNA, 307 bp, Cricetulus griseus; identical to SEQ ID NO: 3035
  misc_feature (258)..(278): n is a, c, g, or t

SEQ ID NO: 6678 - DNA, 582 bp, Cricetulus griseus; identical to SEQ ID NO: 3036
  misc_feature (390)..(427): n is a, c, g, or t

SEQ ID NO: 6679 - DNA, 383 bp, Cricetulus griseus; identical to SEQ ID NO: 3037

SEQ ID NO: 6680 - DNA, 304 bp, Cricetulus griseus; identical to SEQ ID NO: 3038
  misc_feature (90)..(103): n is a, c, g, or t
  misc_feature (105)..(120): n is a, c, g, or t

SEQ ID NO: 6681 - DNA, 434 bp, Cricetulus griseus; identical to SEQ ID NO: 3039
  misc_feature (68)..(94): n is a, c, g, or t

SEQ ID NO: 6682 - DNA, 196 bp, Cricetulus griseus
ctacacccccaacaatccaacagggtttggatattattttagcacacccagaagctgtgttaggtttagaacctacacagcatgggggtgggactccctgacaatggggatcacatcccccaaggaagccagtgaagggttagcctgcacatcagctgaataaaccctgagtaaacaataaataaattttccctga

SEQ ID NO: 6683 - DNA, 300 bp, Cricetulus griseus; identical to SEQ ID NO: 3041
  misc_feature (28)..(63): n is a, c, g, or t

SEQ ID NO: 6684 - DNA, 370 bp, Cricetulus griseus; identical to SEQ ID NO: 3042

SEQ ID NO: 6685 - DNA, 480 bp, Cricetulus griseus; identical to SEQ ID NO: 3043

SEQ ID NO: 6686 - DNA, 515 bp, Cricetulus griseus; identical to SEQ ID NO: 3044

SEQ ID NO: 6687 - DNA, 530 bp, Cricetulus griseus; identical to SEQ ID NO: 3045

SEQ ID NO: 6688 - DNA, 444 bp, Cricetulus griseus; identical to SEQ ID NO: 3046

SEQ ID NO: 6689 - DNA, 444 bp, Cricetulus griseus
accattttaacatcactgtcagcagtgctgcatgacaaaaaggaattccccaatccagagatgtttgacgctggtcaccttctagaaaagtgactactttatacccttctcaataggtaatagaaattcatctccattggcttctgtgacatgaagatctgtgaggaattacacagtgtctcccaagggactggtagacatgcatgtttcccagtgtccatgcactgtacttgatgatgagacttcttccctttgccacaaataaattaaactgcatgtggagtttctttggtgcctatcatcttctctgcagctcctttgatgcccatcatcttctctgaagtagattggtgctgtctctggctggaatcagtctctgtaaaaagagggtaaatggagaatgggtcatggtccagctccaaatgttcctgaatcagcggctgc

SEQ ID NO: 6690 - DNA, 494 bp, Cricetulus griseus; identical to SEQ ID NO: 3048

SEQ ID NO: 6691 - DNA, 363 bp, Cricetulus griseus; identical to SEQ ID NO: 3049

SEQ ID NO: 6692 - DNA, 190 bp, Cricetulus griseus; identical to SEQ ID NO: 3050

SEQ ID NO: 6693 - DNA, 338 bp, Cricetulus griseus
gatgcccgggatttcactgtttccgccatgcatggagatatggaccaaaaggaacgagatgtgatcatgagggagttccggtctggttctagcagagtattaattaccactgacctgttggccagaggcattgatgtgcagcaggtctccttagtgatcaattacgaccttcccaccaacagggaaaactacatccacagaattggtcgtggtggtcgctttggccgtaaaggtgtggctatcaatatggtgacagaagaagacaagaggactcttcgagacattgagacattctacaacacctgcattgaagagatgcccctcaatgttgctgacct

SEQ ID NO: 6694 - DNA, 548 bp, Cricetulus griseus; identical to SEQ ID NO: 3052

SEQ ID NO: 6695 - DNA, 489 bp, Cricetulus griseus; identical to SEQ ID NO: 3053

SEQ ID NO: 6696 - DNA, 579 bp, Cricetulus griseus; identical to SEQ ID NO: 3054
  misc_feature (155)..(184): n is a, c, g, or t

SEQ ID NO: 6697 - DNA, 370 bp, Cricetulus griseus; identical to SEQ ID NO: 3055
  misc_feature (252)..(278): n is a, c, g, or t

SEQ ID NO: 6698 - DNA, 287 bp, Cricetulus griseus; identical to SEQ ID NO: 3056

SEQ ID NO: 6699 - DNA, 577 bp, Cricetulus griseus; identical to SEQ ID NO: 3057
  misc_feature (50)..(97): n is a, c, g, or t

SEQ ID NO: 6700 - DNA, 568 bp, Cricetulus griseus; identical to SEQ ID NO: 3058

SEQ ID NO: 6701 - DNA, 183 bp, Cricetulus griseus; identical to SEQ ID NO: 3059

SEQ ID NO: 6702 - DNA, 183 bp, Cricetulus griseus; identical to SEQ ID NO: 3060

SEQ ID NO: 6703 - DNA, 465 bp, Cricetulus griseus; identical to SEQ ID NO: 3061

SEQ ID NO: 6704 - DNA, 428 bp, Cricetulus griseus; identical to SEQ ID NO: 3062

SEQ ID NO: 6705 - DNA, 580 bp, Cricetulus griseus; identical to SEQ ID NO: 3063
  misc_feature (475)..(495): n is a, c, g, or t

SEQ ID NO: 6706 - DNA, 542 bp, Cricetulus griseus; identical to SEQ ID NO: 3064
  misc_feature (210)..(239): n is a, c, g, or t
  misc_feature (297)..(439): n is a, c, g, or t

SEQ ID NO: 6707 - DNA, 254 bp, Cricetulus griseus
acaactcagaacaactgaacgggactcagcgggttctcctagacaacgtcctatcggaagagcagtgccacgagctacacagtgtggccagtggaatcatgctggttggtgatggataccgagggaaaacatcgccccatacaaccaatgaaaagtttgaaggagcaactgtcttgaaagcactaaaatttggctatgaaggccgagtgccactaaagagtgcacgcttgttctatgacatcagcgagaaagct

SEQ ID NO: 6708 - DNA, 329 bp, Cricetulus griseus; identical to SEQ ID NO: 3066

SEQ ID NO: 6709 - DNA, 567 bp, Cricetulus griseus; identical to SEQ ID NO: 3067

SEQ ID NO: 6710 - DNA, 486 bp, Cricetulus griseus; identical to SEQ ID NO: 3068

SEQ ID NO: 6711 - DNA, 479 bp, Cricetulus griseus; identical to SEQ ID NO: 3069

SEQ ID NO: 6712 - DNA, 480 bp, Cricetulus griseus; identical to SEQ ID NO: 3070

SEQ ID NO: 6713 - DNA, 495 bp, Cricetulus griseus; identical to SEQ ID NO: 3071

SEQ ID NO: 6714 - DNA, 481 bp, Cricetulus griseus; identical to SEQ ID NO: 3072

SEQ ID NO: 6715 - DNA, 423 bp, Cricetulus griseus; identical to SEQ ID NO: 3073

SEQ ID NO: 6716 - DNA, 226 bp, Cricetulus griseus; identical to SEQ ID NO: 3074

SEQ ID NO: 6717 - DNA, 477 bp, Cricetulus griseus; identical to SEQ ID NO: 3075

SEQ ID NO: 6718 - DNA, 600 bp, Cricetulus griseus; identical to SEQ ID NO: 3076

SEQ ID NO: 6719 - DNA, 573 bp, Cricetulus griseus; identical to SEQ ID NO: 3077

SEQ ID NO: 6720 - DNA, 508 bp, Cricetulus griseus; identical to SEQ ID NO: 3078
  misc_feature (248)..(272): n is a, c, g, or t

SEQ ID NO: 6721 - DNA, 537 bp, Cricetulus griseus; identical to SEQ ID NO: 3079

SEQ ID NO: 6722 - DNA, 487 bp, Cricetulus griseus; identical to SEQ ID NO: 3080

SEQ ID NO: 6723 - DNA, 283 bp, Cricetulus griseus; identical to SEQ ID NO: 3081

SEQ ID NO: 6724 - DNA, 481 bp, Cricetulus griseus; identical to SEQ ID NO: 3082

SEQ ID NO: 6725 - DNA, 479 bp, Cricetulus griseus; identical to SEQ ID NO: 3083

SEQ ID NO: 6726 - DNA, 479 bp, Cricetulus griseus; identical to SEQ ID NO: 3084

SEQ ID NO: 6727 - DNA, 570 bp, Cricetulus griseus; identical to SEQ ID NO: 3085

SEQ ID NO: 6728 - DNA, 156 bp, Cricetulus griseus; identical to SEQ ID NO: 3086

SEQ ID NO: 6729 - DNA, 463 bp, Cricetulus griseus; identical to SEQ ID NO: 3087

SEQ ID NO: 6730 - DNA, 495 bp, Cricetulus griseus; identical to SEQ ID NO: 3088

SEQ ID NO: 6731 - DNA, 551 bp, Cricetulus griseus; identical to SEQ ID NO: 3089

SEQ ID NO: 6732 - DNA, 318 bp, Cricetulus griseus; identical to SEQ ID NO: 3090

SEQ ID NO: 6733 - DNA, 428 bp, Cricetulus griseus; identical to SEQ ID NO: 3091
  misc_feature (228)..(243): n is a, c, g, or t

SEQ ID NO: 6734 - DNA, 103 bp, Cricetulus griseus; identical to SEQ ID NO: 3092

SEQ ID NO: 6735 - DNA, 502 bp, Cricetulus griseus; identical to SEQ ID NO: 3093

SEQ ID NO: 6736 - DNA, 531 bp, Cricetulus griseus; identical to SEQ ID NO: 3094

SEQ ID NO: 6737 - DNA, 493 bp, Cricetulus griseus; identical to SEQ ID NO: 3095

SEQ ID NO: 6738 - DNA, 156 bp, Cricetulus griseus; identical to SEQ ID NO: 3096

SEQ ID NO: 6739 - DNA, 523 bp, Cricetulus griseus
  misc_feature (332)..(368): n is a, c, g, or t
actggacgcgctcagatgtcggtgttcctcccagttcttgacccctggtcctgtctccagcccgtctcagcttacccactctgactcctttgagctgcttggaggggcagcttctggtagtagtggcttttatactttcacagaatcccttcatccagagatgtcttctggcaccagtgccctgcagcagcgagcacttccagtgccctcactgcctactgtcgtttagtcactgactgctttctggtttgaaggatgcagtggttcctccttccttgaaccctttctgcgtacgtgtcaccctgctgaaccatgcagcctcaccagagcgnnnnnnnnnnnnnnnnnnnnnnnnnnnnnnnnnnnnnttacagtgaggaatgctattacataaggcactttaagtcagtgacagctccaaatttgcacttcatctgttgactagtaaactgtacccagaacaggagcttgtggacacccctggatggtattgcagcttcaggggcaggcacttctgtcacgg

SEQ ID NO: 6740 - DNA, 578 bp, Cricetulus griseus; identical to SEQ ID NO: 3098

SEQ ID NO: 6741 - DNA, 579 bp, Cricetulus griseus; identical to SEQ ID NO: 3099
  misc_feature (75)..(75): n is a, c, g, or t
  misc_feature (493)..(507): n is a, c, g, or t

SEQ ID NO: 6742 - DNA, 446 bp, Cricetulus griseus; identical to SEQ ID NO: 3100

SEQ ID NO: 6743 - DNA, 508 bp, Cricetulus griseus; identical to SEQ ID NO: 3101

SEQ ID NO: 6744 - DNA, 220 bp, Cricetulus griseus; identical to SEQ ID NO: 3102

SEQ ID NO: 6745 - DNA, 550 bp, Cricetulus griseus; identical to SEQ ID NO: 3103

SEQ ID NO: 6746 - DNA, 431 bp, Cricetulus griseus; identical to SEQ ID NO: 3104

SEQ ID NO: 6747 - DNA, 300 bp, Cricetulus griseus; identical to SEQ ID NO: 3105

SEQ ID NO: 6748 - DNA, 504 bp, Cricetulus griseus; identical to SEQ ID NO: 3106

SEQ ID NO: 6749 - DNA, 431 bp, Cricetulus griseus; identical to SEQ ID NO: 3107
  misc_feature (69)..(89): n is a, c, g, or t

SEQ ID NO: 6750 - DNA, 446 bp, Cricetulus griseus; identical to SEQ ID NO: 3108
  misc_feature (49)..(72): n is a, c, g, or t
  misc_feature (137)..(170): n is a, c, g, or t

SEQ ID NO: 6751 - DNA, 335 bp, Cricetulus griseus; identical to SEQ ID NO: 3109

SEQ ID NO: 6752 - DNA, 197 bp, Cricetulus griseus; identical to SEQ ID NO: 3110

SEQ ID NO: 6753 - DNA, 449 bp, Cricetulus griseus; identical to SEQ ID NO: 3111
  misc_feature (83)..(105): n is a, c, g, or t

SEQ ID NO: 6754 - DNA, 578 bp, Cricetulus griseus; identical to SEQ ID NO: 3112

SEQ ID NO: 6755 - DNA, 485 bp, Cricetulus griseus; identical to SEQ ID NO: 3113

SEQ ID NO: 6756 - DNA, 366 bp, Cricetulus griseus; identical to SEQ ID NO: 3114

SEQ ID NO: 6757 - DNA, 290 bp, Cricetulus griseus; identical to SEQ ID NO: 3115

SEQ ID NO: 6758 - DNA, 259 bp, Cricetulus griseus; identical to SEQ ID NO: 3116

SEQ ID NO: 6759 - DNA, 508 bp, Cricetulus griseus; identical to SEQ ID NO: 3117
  misc_feature (462)..(476): n is a, c, g, or t

SEQ ID NO: 6760 - DNA, 448 bp, Cricetulus griseus; identical to SEQ ID NO: 3118

SEQ ID NO: 6761 - DNA, 321 bp, Cricetulus griseus; identical to SEQ ID NO: 3119

SEQ ID NO: 6762 - DNA, 365 bp, Cricetulus griseus; identical to SEQ ID NO: 3120

SEQ ID NO: 6763 - DNA, 456 bp, Cricetulus griseus; identical to SEQ ID NO: 3121
  misc_feature (41)..(58): n is a, c, g, or t

SEQ ID NO: 6764 - DNA, 341 bp, Cricetulus griseus; identical to SEQ ID NO: 3122

SEQ ID NO: 6765 - DNA, 93 bp, Cricetulus griseus; identical to SEQ ID NO: 3123

SEQ ID NO: 6766 - DNA, 292 bp, Cricetulus griseus; identical to SEQ ID NO: 3124

SEQ ID NO: 6767 - DNA, 100 bp, Cricetulus griseus; identical to SEQ ID NO: 3125

SEQ ID NO: 6768 - DNA, 82 bp, Cricetulus griseus
ctttttcgctcttatatcaaaaccacgattcccaccactaattattataaacgagaacaacaaaatactcatgaacccaatt

SEQ ID NO: 6769 - DNA, 221 bp, Cricetulus griseus; identical to SEQ ID NO: 3127

SEQ ID NO: 6770 - DNA, 431 bp, Cricetulus griseus; identical to SEQ ID NO: 3128
  misc_feature (263)..(280): n is a, c, g, or t

SEQ ID NO: 6771 - DNA, 442 bp, Cricetulus griseus; identical to SEQ ID NO: 3129
  misc_feature (89)..(108): n is a, c, g, or t

SEQ ID NO: 6772 - DNA, 292 bp, Cricetulus griseus; identical to SEQ ID NO: 3130
  misc_feature (153)..(153): n is a, c, g, or t

SEQ ID NO: 6773 - DNA, 341 bp, Cricetulus griseus; identical to SEQ ID NO: 3131

SEQ ID NO: 6774 - DNA, 201 bp, Cricetulus griseus; identical to SEQ ID NO: 3132

SEQ ID NO: 6775 - DNA, 90 bp, Cricetulus griseus; identical to SEQ ID NO: 3133

SEQ ID NO: 6776 - DNA, 516 bp, Cricetulus griseus; identical to SEQ ID NO: 3134
  misc_feature (192)..(211): n is a, c, g, or t
  misc_feature (221)..(238): n is a, c, g, or t

SEQ ID NO: 6777 - DNA, 260 bp, Cricetulus griseus; identical to SEQ ID NO: 3135
  misc_feature (204)..(204): n is a, c, g, or t

SEQ ID NO: 6778 - DNA, 105 bp, Cricetulus griseus; identical to SEQ ID NO: 3136

SEQ ID NO: 6779 - DNA, 207 bp, Cricetulus griseus; identical to SEQ ID NO: 3137

SEQ ID NO: 6780 - DNA, 220 bp, Cricetulus griseus; identical to SEQ ID NO: 3138

SEQ ID NO: 6781 - DNA, 229 bp, Cricetulus griseus; identical to SEQ ID NO: 3139
  misc_feature (149)..(149): n is a, c, g, or t

SEQ ID NO: 6782 - DNA, 406 bp, Cricetulus griseus; identical to SEQ ID NO: 3140

SEQ ID NO: 6783 - DNA, 343 bp, Cricetulus griseus; identical to SEQ ID NO: 3141
  misc_feature (195)..(195): n is a, c, g, or t

SEQ ID NO: 6784 - DNA, 457 bp, Cricetulus griseus; identical to SEQ ID NO: 3142
  misc_feature (78)..(95): n is a, c, g, or t
  misc_feature (160)..(160): n is a, c, g, or t

SEQ ID NO: 6785 - DNA, 455 bp, Cricetulus griseus; identical to SEQ ID NO: 3143
  misc_feature (386)..(400): n is a, c, g, or t

SEQ ID NO: 6786 - DNA, 371 bp, Cricetulus griseus; identical to SEQ ID NO: 3144

SEQ ID NO: 6787 - DNA, 107 bp, Cricetulus griseus; identical to SEQ ID NO: 3145

SEQ ID NO: 6788 - DNA, 343 bp, Cricetulus griseus; identical to SEQ ID NO: 3146

SEQ ID NO: 6789 - DNA, 552 bp, Cricetulus griseus; identical to SEQ ID NO: 3147

SEQ ID NO: 6790 - DNA, 302 bp, Cricetulus griseus; identical to SEQ ID NO: 3148

SEQ ID NO: 6791 - DNA, 221 bp, Cricetulus griseus
gataacaaaaaatgttgttttaactcttacctgagctgacttgctcaggttttatcttatttctaaatagataaaattaaaaaggtaagtaaactaagctaagcattaagcatactgttttaatagctatatactaggtagctaattgctcttgggtttctttagaataaagcatgaagggaaacaatggcttctcatggcattgctcaatgttttgtgtt

SEQ ID NO: 6792 - DNA, 358 bp, Cricetulus griseus; identical to SEQ ID NO: 3150

SEQ ID NO: 6793 - DNA, 522 bp, Cricetulus griseus; identical to SEQ ID NO: 3151

SEQ ID NO: 6794 - DNA, 510 bp, Cricetulus griseus; identical to SEQ ID NO: 3152

SEQ ID NO: 6795 - DNA, 259 bp, Cricetulus griseus; identical to SEQ ID NO: 3153

SEQ ID NO: 6796 - DNA, 141 bp, Cricetulus griseus; identical to SEQ ID NO: 3154

SEQ ID NO: 6797 - DNA, 472 bp, Cricetulus griseus; identical to SEQ ID NO: 3155

SEQ ID NO: 6798 - DNA, 579 bp, Cricetulus griseus; identical to SEQ ID NO: 3156

SEQ ID NO: 6799 - DNA, 385 bp, Cricetulus griseus; identical to SEQ ID NO: 3157

SEQ ID NO: 6800 - DNA, 263 bp, Cricetulus griseus; identical to SEQ ID NO: 3158

SEQ ID NO: 6801 - DNA, 501 bp, Cricetulus griseus; identical to SEQ ID NO: 3159
  misc_feature (363)..(382): n is a, c, g, or t

SEQ ID NO: 6802 - DNA, 404 bp, Cricetulus griseus; identical to SEQ ID NO: 3160

SEQ ID NO: 6803 - DNA, 151 bp, Cricetulus griseus
tcacccgcgccgctcctcgcctctcttgttagcccgagactcgcctctcagccgcccgccgcacagacgcacgagtagacagtgcagctccatcggctgatcctcgctgagctccgagggtaggcggtaccgggcggcccacgatgccgaa

SEQ ID NO: 6804 - DNA, 544 bp, Cricetulus griseus; identical to SEQ ID NO: 3162

SEQ ID NO: 6805 - DNA, 471 bp, Cricetulus griseus; identical to SEQ ID NO: 3163
  misc_feature (330)..(330): n is a, c, g, or t

SEQ ID NO: 6806 - DNA, 493 bp, Cricetulus griseus; identical to SEQ ID NO: 3164

SEQ ID NO: 6807 - DNA, 382 bp, Cricetulus griseus; identical to SEQ ID NO: 3165

SEQ ID NO: 6808 - DNA, 335 bp, Cricetulus griseus; identical to SEQ ID NO: 3166
  misc_feature (143)..(143): n is a, c, g, or t

SEQ ID NO: 6809 - DNA, 421 bp, Cricetulus griseus; identical to SEQ ID NO: 3167

SEQ ID NO: 6810 - DNA, 391 bp, Cricetulus griseus; identical to SEQ ID NO: 3168
  misc_feature (85)..(109): n is a, c, g, or t

SEQ ID NO: 6811 - DNA, 417 bp, Cricetulus griseus; identical to SEQ ID NO: 3169

SEQ ID NO: 6812 - DNA, 92 bp, Cricetulus griseus; identical to SEQ ID NO: 3170

SEQ ID NO: 6813 - DNA, 491 bp, Cricetulus griseus; identical to SEQ ID NO: 3171
  misc_feature (158)..(172): n is a, c, g, or t

SEQ ID NO: 6814 - DNA, 315 bp, Cricetulus griseus
gattatgcctctataaatacctgtgaagaaagagtacagtccaaaatttattagccctgcctttctatggggaaagccaaggttgttggctgatacctctaatcccaaccactgagacccaagggccaggcgggggttatgggaaaatccatatcttcctgggctacagaatgaaaatctcaaaacaaaacaaaatgaattatcttttattccaaaaagagattcgcaatttgcaattcaaatatcttttttaaaaagttagtaatgtagagcagggtgtagtggtacatgcctttaatcccaccacttgggagg

SEQ ID NO: 6815 - DNA, 506 bp, Cricetulus griseus; identical to SEQ ID NO: 3173

SEQ ID NO: 6816 - DNA, 347 bp, Cricetulus griseus; identical to SEQ ID NO: 3174

SEQ ID NO: 6817 - DNA, 489 bp, Cricetulus griseus; identical to SEQ ID NO: 3175

SEQ ID NO: 6818 - DNA, 182 bp, Cricetulus griseus; identical to SEQ ID NO: 3176

SEQ ID NO: 6819 - DNA, 437 bp, Cricetulus griseus; identical to SEQ ID NO: 3177

SEQ ID NO: 6820 - DNA, 362 bp, Cricetulus griseus; identical to SEQ ID NO: 3178

SEQ ID NO: 6821 - DNA, 329 bp, Cricetulus griseus; identical to SEQ ID NO: 3179
  misc_feature (194)..(214): n is a, c, g, or t

SEQ ID NO: 6822 - DNA, 578 bp, Cricetulus griseus; identical to SEQ ID NO: 3180
  misc_feature (198)..(198): n is a, c, g, or t
  misc_feature (543)..(543): n is a, c, g, or t

SEQ ID NO: 6823 - DNA, 553 bp, Cricetulus griseus; identical to SEQ ID NO: 3181
  misc_feature (273)..(273): n is a, c, g, or t

SEQ ID NO: 6824 - DNA, 374 bp, Cricetulus griseus; identical to SEQ ID NO: 3182

SEQ ID NO: 6825 - DNA, 436 bp, Cricetulus griseus; identical to SEQ ID NO: 3183
  misc_feature (269)..(321): n is a, c, g, or t

SEQ ID NO: 6826 - DNA, 481 bp, Cricetulus griseus; identical to SEQ ID NO: 3184
  misc_feature (403)..(403): n is a, c, g, or t
  misc_feature (445)..(445): n is a, c, g, or t

SEQ ID NO: 6827 - DNA, 507 bp, Cricetulus griseus; identical to SEQ ID NO: 3185

SEQ ID NO: 6828 - DNA, 484 bp, Cricetulus griseus; identical to SEQ ID NO: 3186

SEQ ID NO: 6829 - DNA, 306 bp, Cricetulus griseus; identical to SEQ ID NO: 3187

SEQ ID NO: 6830 - DNA, 482 bp, Cricetulus griseus; identical to SEQ ID NO: 3188

SEQ ID NO: 6831 - DNA, 430 bp, Cricetulus griseus; identical to SEQ ID NO: 3189

SEQ ID NO: 6832 - DNA, 446 bp, Cricetulus griseus; identical to SEQ ID NO: 3190
  misc_feature (323)..(359): n is a, c, g, or t

SEQ ID NO: 6833 - DNA, 369 bp, Cricetulus griseus; identical to SEQ ID NO: 3191
  misc_feature (123)..(137): n is a, c, g, or t

SEQ ID NO: 6834 - DNA, 84 bp, Cricetulus griseus; identical to SEQ ID NO: 3192

SEQ ID NO: 6835 - DNA, 515 bp, Cricetulus griseus; identical to SEQ ID NO: 3193

SEQ ID NO: 6836 - DNA, 366 bp, Cricetulus griseus; identical to SEQ ID NO: 3194

SEQ ID NO: 6837 - DNA, 332 bp, Cricetulus griseus; identical to SEQ ID NO: 3195

SEQ ID NO: 6838 - DNA, 436 bp, Cricetulus griseus; identical to SEQ ID NO: 3196

SEQ ID NO: 6839 - DNA, 540 bp, Cricetulus griseus
  misc_feature (41)..(56): n is a, c, g, or t
aagaggatgacgttgtgaagctcaagaatcacgaccctcannnnnnnnnnnnnnnnccacctgacactccggaaatcccagataaccactttttggataatctttgcatcttttgtggggagaggaatgagtccttcacagaagagggcctggacctccactactggaagcactgcctcatgctgacgagatgcgaccactgcaggcaggtggttgagatatccagcctgacagaacacctgctgacagaatgtgacaaaagggatgggtttgggaagtgccaccgctgcaaggaggctgatgacaaggaggagcttcccaagctcctcaaaaccaaggagtgcaaccctgccaaatcggagaaggtggcaaaccgatgtcctctatgtcatgagaactttgcccctggagaagaggcatggaaggttcatctgatggactctactggctgcacaatgaacctgcgaaagacacatgttctttacaaagccaccgccccacagcaagggaagggcccagcagcattgaagtcaagcacct

SEQ ID NO: 6840 - DNA, 600 bp, Cricetulus griseus
aacttaaaggaatggcttcgtggaaacaaaaatatgaacctctaggactggatgctacaggcattgaagacgccattactgctgtgggctctttcatcctcaaggcaaacgaacttctccaagttatagatagtagtatgaaaaacttcaaggcattttttcggtggctatatgtagcaatgctgagaatgacagaagaccatgtgcttcctgagctgaacaagatgactcagaaggatataacatttgttgctgaatttctcactgaacatttcaatgaggctccagacctttataatcggaaaggaaaatactttaatgttgaaagagttggtcagtatttggaagaagaagaccaccaccttgtgtgacccccttaccccaaaaggaacccagtggttgacttcttccaaaacagcagccacctgaaagaaaggcctttgctgtttccttattaccctcgaaaatcattgcattttgtgaaaaggcgaatggagaacattattgatcagtgttggcaaaagccgggcaatgtatttggaagatcgatgaatcaggcaatttgcatttcattatatagagatgctaggagtatggact

SEQ ID NO: 6841 - DNA, 547 bp, Cricetulus griseus
  misc_feature (87)..(106): n is a, c, g, or t
ggtacgtgaataatagccacctagaagtgaattttaaccttaaaatacctattccagaaagtaaattaatgtattcaaactcagggnnnnnnnnnnnnnnnnnnnntgaggctttaaaaaccttagtcaaacaaagaaaaaactcggggttccaggagatctggcttgtgcaggcaccaggcatgcactaaatgcacagttctcatagaaaagtaaatcaaagagaccagtgagtatgagcatccatagtggattctttttaactctttgtaggactgttataattaaaagttgtttaagccagccatggtggcacaaatttttaattaacacattcaggcatcagatacaggttgacttctgagtttgaggccagcctgctacagagtaagttccagaatagccagggctatccagagaaaccctatcaaaaaatgaagaaaaataaaacctgtttaaactacttgatagtttagaaacaaaagccctccttagttaattctataaagccagagcaaacttttccacaccctgcaaaatccatcag

SEQ ID NO: 6842 - DNA, 568 bp, Cricetulus griseus
  misc_feature (442)..(461): n is a, c, g, or t
  misc_feature (548)..(568): n is a, c, g, or t
ctgatggattttgcagggtgtggaaaagtttgctctggctttatagaattaactaaggagggcttttgtttctaaactatcaagtagtttaaacaggttttatttttcttcattttttgatagggtttctctggatagccctggctattctggaacttactctgtagcaggctggcctcaaactcagaagtcaacctgtatctgatgcctgaatgtgttaattaaaaatttgtgccaccatggctggcttaaacaacttttaattataacagtcctacaaagagttaaaaagaatccactatggatgctcatactcactggtctctttgatttacttttctatgagaactgtgcatttagtgcatgcctggtgcctgcacaagccagatctcctggaaccccgagttttttctttgtttgactaaggtttttaaagcctcannnnnnnnnnnnnnnnnnnnccctgagtttgaatacattaatttactttctggaataggtattttaaggttaaaattcacttctaggtggctattattcacgtaccnnnnnnnnnnnnnnnnnnnnn

SEQ ID NO: 6843 - DNA, 610 bp, Cricetulus griseus
aatgaagaccctcaaaataaaaaagagatctgaggatgaggttcagtggtcgttactatgcacaaggccataggttcaagccccagtactttttaaaagcaacatctgacatttagaatagcatattataagacatagtcctaaccgagatagttgtatttgaattaaccctggagaccactctagtggttatttttcctttattttggctcacaatttcagagcggtttcaatacatcatggcaggaaaggcaaaacaactccaactctggctgtgagatgggagcctgaagaagagcagctgctcacaacacaggaagcaatgagaagagtgagcctgtccctggtagtctgcttctcaccagccagccccttccataggccggacagccttcacaatagggcacagactggggaccaagtattcaccacataatcctgtagtggacatttcagattcaaaccctaacagtaactgtagaagagaaagttaaaaagctgttcgttcacaagaagtgatctgtaaccctttactgtgtcctcatgctgtgagctgagagttggagtttattgcctgaaggagactgaataaaaacttgatgagagaaga

SEQ ID NO: 6844 - DNA, 600 bp, Cricetulus griseus
  misc_feature (31)..(59): n is a, c, g, or t
  misc_feature (200)..(230): n is a, c, g, or t
  misc_feature (449)..(485): n is a, c, g, or t
tattgagggttaattgctcgctagacgcccnnnnnnnnnnnnnnnnnnnnnnnnnnnnncgggtatccgctcaattttcccccccaaataaaaaaaaaaccccccattttaaaaacccccttttaaatttttttaaaaaaacccccccctttaaaaaaggggggaaaaaccaaaaaaccctttttaaaaaaccccccccnnnnnnnnnnnnnnnnnnnnnnnnnnnnnnnccaaaaaggcccaaatgttcccccaaccgggttaaggaaaaaaaacctcctaaaaaagggggttttttaaaaaaaaaccccttggggggggacacctggtttttatttggaaagggaaccccctttccttggtgggggtttaaaaggggcccaccccccgggggggaaaaaacccccctttttttttttggggcgcctttttaaaaaaaagggggcccnnnnnnnnnnnnnnnnnnnnnnnnnnnnnnnnnnnnnttctgcacccccccttttttaaaaaaagggggaaaggggttttccccccgggtttttttatatattttttttgggcccccgggaaaaaaattatattggggcccgttgtttataa

SEQ ID NO: 6845 - DNA, 600 bp, Cricetulus griseus
tcgtaaactgggatttgtggtattgtgtggtagactgccacctcagctaatctatggagttagtgcttgcttaacagcataacccaaaggaaggtcccaacaggatcccacaccagacctgtctctggctgattttcaggatacttcacacttgtcccttcggtagctccagcctagagatcatcaacttgtgagccaccagatggctggctctattcagtgtgcccttctcaacattcctagggatattctggatggttagacgattctctctgactgattggtctgtgatatattttgaatatgaaacattccctgcaggctcatgtgtttgaacttaggacccagctagtgaccctgctttgggaggctgcggaacctttatgacatgacgtctacctgatgtgcagacttacgagttgttacacgccatcctaagcttccagcaatctttacgctcatgatagccacaggggtggaatctacagtcttgtgcctccactaccacactcttgacctgcttgcactactgaggcctccctgtcatgactggttgaattccctgacccctgggccagagtgagtacttacccatagttg

SEQ ID NO: 6846 - DNA, 600 bp, Cricetulus griseus
tattaagggactgatgaatacatagggtgtgaatactcagtaaaggatgattcaataatgaggctatttttccttttctttgataattaaatttttttggatagtaagagaataaatacttgctcaaaatggccccaaaattctgaggagacagagctctggattattttgtttcatatcaattcattaaaacacttatttctagcactgaaatcaggctaggaaacccacatttgggatcagtcccctatctgacacttaaggaaactagtgacattatttctcacaccccaaagatgtatttctgatggataggagacattggcggtaacttaataaacaacttttctgatgcctattgtaacatttcaaccatcactatcactctaaaagcccttaaattattttcttaggtagcaactgatggatttcactaactagcacaagtcactaaacatacataggaaatgggcaagccacaagttaatggcaggtcccataacttatataaagagagctagattcagagaaaaggatcttacttagactacttataattgtcctattggtccacagcactataaaagttcagtgatttga

SEQ ID NO: 6847 - DNA, 629 bp, Cricetulus griseus
  misc_feature (158)..(194): n is a, c, g, or t
gatagcaacacagagagcatgtggcaagactgctcataccatggtggtggtacagaaagggaagaggaaagcacagtgggggagacagatgataggtgatagataataaataggtatatatggatgatagatgatagatgatggatagatatagatgnnnnnnnnnnnnnnnnnnnnnnnnnnnnnnnnnnnnngtaggaagatactgattaagtaagagcaagttgcctggccagggattgttttatgtggcagcatatcgatgattcagaggacttacttgggaatgttgtaattatggcagcttgggaaggaggcgccacatctcagggcatgccgtatttactcttggtgaatgattattgcgttatcaattgatgtttctagataagagtgcttgattctactgaattaaaatacttctaggcactaaatcagagatttaagatttgaatgtttaatctccctctgacattatataacagaataaagtttatatcttaattgtgagacatgcctatgttggcatataattactgtcctaaattgtgtgcttactaaaggattcctaatattctatgctggacaatatacattattataatgaggtatgggagcagaatgggaag

SEQ ID NO: 6848 - DNA, 600 bp, Cricetulus griseus
ctataacaagagtggggtgggtaaagtcggcgaccagatcctgctggccatcaggggacagaagaagaaagcgctcattgtgggacatcgcatgcctggctcccgaatgaccccaaggtttgactccaacaatgtggtcctcattgaggacaatgggaaccctgtggggactcgaattaaaacacctatcccaaccagccttcgcaagaaggaaggcgagtattccaaggtgttggccatagctcagaactttgtgtgagcagagcggctctgagccatgcaaccattcccttcacactggtaacagaataaatgttttaatgtgtgttttcttcctatgctgtctgagctgcggttgtgaggagggtaacagcagttgaatactggcttcctccctcgacccccggagtggcctgggctttctttacagctcacaatcatgggtcattcagtgattcaacaaccgttgctcttctcttcttcacttgttggtctccttggggggagtaaggactcccttagtttctttaatagaatctcgtcaacacacataatattttgttaaagatactgtggggttaaagagatggctactcttct

SEQ ID NO: 6849 - DNA, 549 bp, Cricetulus griseus
gaaacctatgattatggtggttttacaatgatgtttgatgaccgccgtggacgtcctgtgggatttcccatgagaggaagaggtggttttgacagaatgcctcctggtcgggctgggcgtcccatgcctcctgctagaagagattatgatgatatgagccctcgtcgaggaccaccaccaccacctcctggccggggtggccggggtggcagcagagctaggaatcttcctcttcctccaccgccaccacctagagggggagatctaatggcttacgatagaagaggaagacctggggaccgctatgatggcatggttgggttcagtgctgatgaaacttgggactcggcaattgacacatggagcccatcagaatggcagatggcttatgaaccacagggtggttctggatatgattattcctatgcagggggtcgtggctcatacggtgatcttggtggacctattattactacacaagtaactatccccaaagatttggctggatccattattggcaaaggtggtcagaggatcaaacaaatccgt

SEQ ID NO: 6850 - DNA, 600 bp, Cricetulus griseus
agaggatgcagagcgtcagaagccatgatgcatgtagtgtgtgtgctgcagctgcagtgggccccagaccagagaaaagcagtaaagaatctacctcactgggaatatcatcattgctgacttcagatggattcaatcatccagtcccttcttcagggcaaagtcctgaggttggtagccctacgagtcttgctcgctctgtctctgcttcagtctgcgccatcaagcccagtgaccccaatagcattgaacctatagctatggaggctatgaaggcttcggctgaattgcagacgaactctaaggaaacagagcctcctgctctgcaggctcttcctcatctcgcttccccagcaggccaggatccagctatgcctttgcgtctttcatctgaagaagcatttgttacagataatccagagaaatctgtggaaagaagagcccagggcctcagagtttatctccacacaagacaggacactagtttatctctcacaactactgggatgcatgggctacaggggtttgtagaagaaaagagttggcatccagaaaatccgaaccccagtcaaatgaatggccttcagcaacacagagaac

SEQ ID NO: 6851 - DNA, 599 bp, Cricetulus griseus
  misc_feature (417)..(435): n is a, c, g, or t
aaagataattgttcatttgaagcatgtacaatgtaaacaatttcagatggccaggaaaagagtaagcacagtggaaataagatctttgaaaccagacttgtctgtgttttaattctacttgtgctttactgttgctttagaaatggggaagtgacccaacctatcctatgaaaccttggtgtttacatgtttgaaatgaggctaggaactggagacaaggttcagcaggaaatagtgcctgcttttcaaaaaggactcaagttttagttcctggtgcccatgctgggttgctcacaactgtctgtaattccatcttggcagacacacacacacacaccaatctccccaaaacttaaaaattagctggacatggtaccacacacttttaatctcagcattagggaggtagagtcagannnnnnnnnnnnnnnnnnntgccagcctgttatatatagaaagttccatgatggccagggttacatagagaaagcttgtctcaaaaaataaaaattaaataaaataagatggctaatggcaccaattcatgctttatctgttcaaacatgtttcccaaaattcaccccttttctcttcttgag

SEQ ID NO: 6852 - DNA, 610 bp, Cricetulus griseus
  misc_feature (153)..(175): n is a, c, g, or t
ctcggggacacccgcactgctatggctaccggtggcggcgtggcctccagagaggggctgcgctacgccgaatacctgcccccctccacccaaaggccggacgccgacatcgaccacgccgcgggaagaaggctgatagctgtaggactaggnnnnnnnnnnnnnnnnnnnnnnngtcgctatgcatttcaaatgtggaaacctctagaacaagtaatcacagaaacagcaaggaagatttcatcaccgagcttttcgtcctactataaaggaggatttgagcaaaaaatgagtaggcgagaagctagtcttattttaggtgtaagcccatctgctggcaaggccaagattagaacagcacacaagagaattatgattttgaaccatccagacaaaggtggatctccttacttagcatccaaaataaatgaagcaaaggacttgctagaatcgtccaccaaacttaaatgatgctgaaagatcctaccaaaggaaaaggtgcaaggctctagaagtcttcctacagaagactatggaacatggacttgcttcatattaaccaactctgttcttctgtcattaagtgtgcagcaataaaagatatgcacct

SEQ ID NO: 6853 - DNA, 233 bp, Cricetulus griseus
catatggttaagatatctttatttagataaacatcagccaaacacaagccagagcatgccaggggcagcaaggcagccaggccagagagaaggggtccccatgtgcctgcagacccttaagaacctaacatcctgacctccccttgaccacgctctgacaggagtagtcaggcacacctgtagccaacccttaggaggcgtagttacagtgtctccctacacaaatgggtgaa

SEQ ID NO: 6854 - DNA, 600 bp, Cricetulus griseus
aactggtcctcaagagctcatatccttcctgtgacatttcacatctgatgactgcaatgggaactttgatcccaactgtgggtcacattgatggaaacggactctgaagttcctagctaaaccaaaaccttgttggatttgctttcagtttgcttctcatatggcttggcttatgctctctctatctccagttctagcaatgtaactttagagggttttttcctccctaaaaataccttgcatcacacatggcttttcaacatctgtttccacagaatctgacctggagacaggaacttgagcagaatgtaaaagagaactagccaaggggaaatccttggtatagaggaatgtttcacagtctatgctttattcatttgaaaaccgtatttccaaatggaaacaaaacaggctgaacaaggaaagttcagtcactattgggtgtgtggtaggacacggcatctctggcagtcgaggttgttagtcctgttagtgttggtcgtaagccttcactctccttcttaatctctacatcaacctttcaccttgtttcagagaagtttttccgtctttggaaagaagcatcatacattctccatc

SEQ ID NO: 6855 - DNA, 600 bp, Cricetulus griseus
gaatgttcagtatgaaaacttgggaggcagacaagccaaccatttctttgccttcattcgggatatagatgaggaaggtctgtaatgttaggacctggtagcagtcctcagaacctcatagtaatggcttagtttaggtttatgtcagtttaatgaaaatatttgtatatgtcatctggaagcatgcctagtgttaaatcacttgcctggcttcagcaggtttccagataagttgagagaatacagtgaaactaaagccacagaattgacactcggttatggtcaggttagggcacaggttttatgaggaagattttaataggaggagagcaacttttatgaatataaaggaaagaatgcagcacaaatctgaatgagaaagtgtctgccctcctaatctagtcatgtgtggaaagggtgactggggtattttgtgggaacctgtaaggattaggattctagtgttggtggtggtggtgggggggggacatatgggtttactagagaaactaatgggggcctggagactgatatacctgggagcctagcatagcgtgcgtaccttaatcccggcctgatgacagggctggggcagggacc

SEQ ID NO: 6856 - DNA, 600 bp, Cricetulus griseus
gactgtaagttgtctgatatctctccaattggaagggatccctctgtgtccagttttagcagttctaccctcactccctcctccacatgcccctctctggtggactcaaggagcaactcaatggatcagaagaccccagaagccaactctcgtgcctctagtccctgccaagaatttgaacagtttcagatcatcccaactgtggagacaccctatttggcccgagcaggaaaacatgaatttctcaatcttgtcccagacattgaagaagtgagagcagggtcagtggtatctaagaagggatacctgcatttcaaggagccactttccagcaactgggctaagcatttcgttgtggttcgtcgcccttatgtcttcatctataacagtgacaaagacccagtagagcgtggcgtcattaacctgtctacagcccaggtggagtacagtgaggaccagcaggccatggtgaagacacctaacacctttgctgtgtgcacaaagcaccgcggggtccttttgcaagctctcaacgacaaggacatgagtgactgggtatatgcctttaacccacttttggctggcacaataagtcaaaac

SEQ ID NO: 6857 - DNA, 56 bp, Cricetulus griseus
ttctacaaactcttctaatcccaacattttcagcaaacgagcttatactattttat

SEQ ID NO: 6858 - DNA, 560 bp, Cricetulus griseus
gggctcactgactgaaaataagcaaggctttctgctttgtctacctttcagccttggagtagttaggttcatttgtgactccggagagcaataagccattttccaagagtaaataaaaatcatgatctctgatatactgtgccaggtcctttgaacaaactaccattacagcagcagcatccaccagctgcattggtgggatgttctaaatatgttcagtagccatatgtcctgttaagggctttcagtgtgtctaattccatggaagaactaaggccagaagaagggcatcagagggttatctcagcatggagaggcattatagctcaaggccaacccaaattttgtttagtttttggtttttggtattgtgtggttttgtgatcagggtctcactatgtagctactgctagcctggacggaactctatatgtagctcaaagtggcctcaagctcatagaaatgtacctacttgtgcctccagagtgttgggattaaggtatatgccaccacacccagatcaaaaactaatgttttttatttaagtggacacgtgtggt

SEQ ID NO: 6859 - DNA, 545 bp, Cricetulus griseus
tatccctccatggggagtgggctctagtgaagccacattatgcagcagagcacccttctgccatttttgacctctaaccaggacagaactagggtcattgacagattctggtcagggataagaaccagaacatcttgctttcagggttcctctccctcattgtgcctgaccaattattctattctcatcagcatcaccacagtgtccccatccatcatggatgacaacctcatggaagctgcatcagtagtccagtttcagtcaccctctgcttgctcatatactctaatatcttagaagattatgcgcagttggtggggtatagaaaggagtaaaggctcgaatcctacgttaaagtcctgttaacccctgtcatccctttactatggcgtgtcaacagttctatcacagtcactattgaccttgctagctctgtatcattctgcttatatatggctgtggctgcagagacagagatatctctgctctgataatagatgtttaaggtgcgcccaaagaaaaagtcattctaccgcccctgaaat

SEQ ID NO: 6860 - DNA, 600 bp, Cricetulus griseus
aattcaccatggagtaactactggttgaagttgatgcagagaattctggaccttgaggacaaagactaaaatgacttctataatgaggaaggagcatgtcttttgggcatttgtatgtctgttgctcagcattgtcccggagcttcttagtgctctgcctgaggaagttgatggacatgcaaaaaccacagattcagaacagccaccaatgaaaccgaagcatacattttgcgcaatgaaggtagatgatggaccgtgcaaagccatgataaggagttattttttcaatatttttacttaccaatgtgaagaatttatatatgggggatgcagaggaaacgaaaatcgatttgaaaccctggaagaatgtaaggagacatgcatcagaggttataaaaagaagactgtaaagacaccatctggagcagaaaagccagatttctgcttcttggaagaggaccctgggatctgccgaggcctcattactagatatttttataataaccagtcaaagcagtgtgagcaattcaagtatggtgggtgcctaggcaaccgcaacaactttgagactttggatgaatgcaagagcatctgtgagga

SEQ ID NO: 6861 - DNA, 600 bp, Cricetulus griseus
  misc_feature (121)..(142): n is a, c, g, or t
gggcatgtggcctgtggttcacattcagaaaaagaacacaaaaactcgagccaattttggctcccgcccatttgcgtatgcggaaggacaggcccatcgtaatgctgcggacttgtgcacnnnnnnnnnnnnnnnnnnnnnngctaactttgaggccctgccatttgctatggcatctgatagtgacaacgatgctggcaccagtattgcatcagatccaggcactcatgggccaccatgccgaattgctgcagtggccacagcccagcaacaatatgacagtgacacctcctgccattataaagtggagctcagctatgagaatttcatcacctctggcccagacccccatccccctcccattgcggatgatgaaagtgatgacgatgacgatgatgacatcccacaggaagaccactatgccctgttggtgaaagcttgggagaccaaggttttccctaccatccgaagacgctttcgaaatgaagctgagcggaagtcaggcctggaccagatcaagggtgctttacaactaggcatggtggatatcgcccggcagacagttgaatttctctatgaggagaatggcggcatcccaag

SEQ ID NO: 6862 - DNA, 574 bp, Cricetulus griseus
gtatacaccccaaccgggcgcccccggggggggggacccccatgaggaaggggaggaggggggggacccgccccgagggaaaaaaacccctaccgggggcaaagagaaaaaaaatgccaccccaaagaaaatattcccccacgccaacaggaagcatgcctagcggaaaatcactggactggcttaaacaaggaaccagataaactgagagaatacagtgaaactaaagccacagaattgacactcggttatggtcaggataaggcacaggatgtatgaggaagaactgaataagaggagagcaactttaatgaatataaaggaaagaatgcaacacacatctgaatgagaaagcggatgacctcctaatcgacacatgagaggaaagggcgaccggggcattcagggggaaccaagaaagaataagagcctagcgctgaagaaggtggcggcagggggccaaaggggcaccggagaaaatagcgagcccctgagactaaacacctgcgacccaaccagccatcggaaccttacaccaggccaagacgacagaacaggggccagggccacacgc

SEQ ID NO: 6863 - DNA, 600 bp, Cricetulus griseus
acataggactctcctgctgacggaggacatgcacacaggcgctgcgtgatgaatagcatcatgtgtgttgctttcccagccagaggagaggacatcttgcctcactccccaggagaggccccgtctcaggtgtgacttcagccaacatccaaacccatatacaggtccaaggtcacagggacagacaactttgccatcccctgaacgaacaggcagcgttggaatcttccagaaaagaccttcaggagtaaagcagagagaaagcaagtctgtccctgggcctgagggggcacaaacaactccttttctctgtagaaacaaaggaaaggcggtatagacttgaatcctcctcctcggtggatctggggaacgtatgattaggcacaataatgttctttttaaaattaacagcagaccttatgtagaaaagcaatcactggtactgaggtacaaagaagccatttgtgggattggaacagcagggaaccaggggatgaggtaggagagatgtcttgtgggaactaaagtcaaacaagaccttagagcagctgcccaggtcactgacagaagtgtgcggtatttgcactaaatcttcagtgt

SEQ ID NO: 6864 - DNA, 630 bp, Cricetulus griseus
  misc_feature (326)..(357): n is a, c, g, or t
tttcagtgtactgggaatcgcttttaactgagaagcacttctcttgtagatgtttttgtaattaagatatcgatttcagtgtatagggatgctaagcaagagtcacagatatacagatacaaatctagatcattacagaagagtcagtatgctgcttgtttagcactactgactgccattgtaagcatgcagaaaaggagcattgcagctagtgcaggcagattgcaaaggtgctgccatttgaaggcctcagacttgccgacagctgaagattcagcaagtaaaagctctgagatggagcaagagccatttgttgaaataggtgnnnnnnnnnnnnnnnnnnnnnnnnnnnnnnnnattttaggcaattgttcaactcatctctaataaagttctcattttcatcagtttttcaacattgccgttcagagctccacacagtttaaaatggtgaatgttttaaataagatctgataaaattctgaatgataacagtttatgtgtgatctacattaataaatattttggaagcctgaaaggtattactattggccctgtttgattagttagtaaggtaactaagatttaaaaggggtcccttctaaagcgtcccccacagcattaaaataa

SEQ ID NO: 6865 - DNA, 600 bp, Cricetulus griseus
agaagcgaagctcaggctactactataccagaactggagatgcccagcttgcctgctatttcagtgctgcagtggcctctgctaagtaaaaagtcttcatagagatctccctgtcagctccccagcatgacactgcagtacctcatgctcctgactgccctcctgatgggaggctccagcaagtccacagagagcaaggcccagcaacctgagtgttgtatgaatgcagtagacttcaatgctacctgcccaggcacaggcctatgtggcccaggttgctacaggcattggaatgcagatgggagtgttagctgtgtccggtgctggaatgggaccttcccgacatacaatggctctgagtgcagaattctcactggccggggcatgcagtttcccatgaacagaagcacagggactcctggacagccacattttgggggtcctgatgtggcagcttacctcttcctggggacactcttcatcagcacaggcctcatgctctctgtggctgggttcttctacctcaagcgctccagtaaacttcctgaggctttctacaggagagacagagcccctgtcctgcagcctggggaaacagct

SEQ ID NO: 6866 - DNA, 571 bp, Cricetulus griseus
  misc_feature (47)..(79): n is a, c, g, or t
  misc_feature (93)..(106): n is a, c, g, or t
  misc_feature (108)..(138): n is a, c, g, or t
  misc_feature (147)..(179): n is a, c, g, or t
  misc_feature (181)..(231): n is a, c, g, or t
  misc_feature (276)..(296): n is a, c, g, or t
  misc_feature (322)..(335): n is a, c, g, or t
  misc_feature (337)..(359): n is a, c, g, or t
  misc_feature (375)..(401): n is a, c, g, or t
  misc_feature (403)..(457): n is a, c, g, or t
cagagatccaggacacggagggcattccccctgaccagcagaggctnnnnnnnnnnnnnnnnnnnnnnnnnnnnnnnnngaccctgtccgacnnnnnnnnnnnnnngnnnnnnnnnnnnnnnnnnnnnnnnnnnnnnntgggtggtnnnnnnnnnnnnnnnnnnnnnnnnnnnnnnnnnannnnnnnnnnnnnnnnnnnnnnnnnnnnnnnnnnnnnnnnnnnnnnnnnnntagatccaagacacggatggcattccccctgaccaaaagaggttnnnnnnnnnnnnnnnnnnnnntgaagatggccggaccctgtccgacnnnnnnnnnnnnnngnnnnnnnnnnnnnnnnnnnnnnnacgactcaggggtggnnnnnnnnnnnnnnnnnnnnnnnnnnnannnnnnnnnnnnnnnnnnnnnnnnnnnnnnnnnnnnnnnnnnnnnnnnnnnnnnngcaagattcatgacacggatggcattcctcctgaccaaaagaagttgaactttgccggtaagcagctggaagatgggcggaccctgtccgactacaacttccagaaggaagcca

SEQ ID NO: 6867 - DNA, 56 bp, Cricetulus griseus
ttctacaaactcttctaatcccaacattttcagcaaacgaagctatacctatttat

SEQ ID NO: 6868 - DNA, 600 bp, Cricetulus griseus
gacagcccacagaattggaaaagatcttcaccaaccccacatctgacagagggctgatttccaaaatatacaataaactcaagaatctagccaccaaaacaccaatcaatgaaattaaaaagtggggcacagagcaattttttcttatgtttctcatttttcatttcactcattagattttgtatggaagaatgccaagtagggaagactgggggatctaccttgagggtgtcttttattgactcacaagcatgatgttttagggtttctgttgtgatgatgaaatactatgaccaaaggcatcttgggaaggaaatggcttattttaattacatttccacatcacacttcatcactgaaggaagtcaggacaggaactcaaacagcacaggaacctggaggcaggagctgatgcagaggccatggagagatgttgcttactgacttgttcctcattgcttgctcagcctgctttcttatagaacccaggaccactgaccctgatgtgttccctactcacaatgggctaggacctttccaaacaatcactaattaagaaaatgctctatgggcttgtctccatgtgtcccaatcttatgg

SEQ ID NO: 6869 - DNA, 600 bp, Cricetulus griseus
attgaggaggtgaagagcaccacgaagacgcagcgcatcgcttcccacagccacgtgaaggggctggggctggacgagagcggcctggccaagcaagcggcttcagggctcgtgggccaggagaacgcgagagaggcatgtggagtcatagtagaattaatcaaaagcaagaaaatggctggaagagctgtcttgttggcagggcctcctggaactggcaagacggccttggctctggctattgctcaggagctgggcagtaaagtccctttctgcccgatggtgggtagtgaagtatactcaactgagatcaagaagacagaggtgctgatggagaacttccgcagggccattgggctacggataaaggagaccaaggaagtttatgaaggggaggtgacagagcttactccgtgtgagacagataaccccatgggtggttatggcaaaactatcagccatgtgatcatagggctcaaaactgccaaaggaaccaaacagctgaagctggaccccagtatttttgaaagtttgcagaaagagcgagtataggctggagatgtgatttacattgaagcaaacagaggagctgtggaaagg

SEQ ID NO: 6870 - DNA, 600 bp, Cricetulus griseus
atgcctagggtggctctagagaaggagctagaagcgatcaaagcccgagtcagggagatggaggaagaggctgagaagctaaaggagctacaaaacgaggtagagaagcagatgaatatgagtccacccccaggcaatgctggcccagtgatcatgtctcttgaggagaagatggaggctgatgcccgttctatctacgttggcaatgtggactatggtgcaacagcagaagagctggaagctcactttcatggttgtggttcagtcaaccgtgtcactatactctgtgacaaatttagtggccatcctaaagggtttgcgtatatagagttctcagacaaagagtcagtgaggacttccctggccttagatgagtccctgtttagaggaagacaaatcaaggtgattcccaaacgaaccaacagaccaggcatcagtacaacagaccggggtttcccgcgtgcccgataccgtgcccggactaccaattacaacagctcccgatcgagattctacagcggttttaacagcaggccccggggtcgagtctacaggggccgggctagagcgacatcatggtattccccttactaaaaaaag

SEQ ID NO: 6871 - DNA, 600 bp, Cricetulus griseus
atgacatttttctcattttcagattgctacacagtgagtgaaattacccagtcaaagccagccacctcttatctgatgcactggctggctcctagaaacttaatcatctccagcgtcacctttttaataataaaatatataatgccaatccatcttccagtcctgaaaacaggtgccctctacttgcaaaggactttcatgttatgcatggcatgggttagctgaagcgatcaccctgttaaccctcatgcaggcaacttgaacataaacgtttcatctcttcccccaaggagccttgcttgacagcagcaacatgagtagatttctacccagacatttcctggcagtctcttcactagcagagattgtaaaagcagtcgtgcataacgggaaagaaaaaatgactctataatctgaatcccttttaaaaactagtatataacaattttacacaatagtggggctccttatgacattttaagacatgtacataatgtatttcaattcttatattctgataagtatattggttgatgtttcataccatgtattttttcaaacaaacccttttatatttaatataaacgcgagtgcgtgtgt

SEQ ID NO: 6872 - DNA, 630 bp, Cricetulus griseus
ggaccagcaggagcttctaggaggcggattaagtcacaccctctatcactaagaataaagatgaaaacttagtactggaaccttgggagatacactgaaaccagaggaatcatactttgtaatctcttgtgaaagagcgtatgttgccaagactcacctaaagctctgagtaaacactatttgcactatagcacaacatgacgctaattctatattgtgcccatgattgtgttaagggttagactgtatctctagtgctgaccagggcagatcaattacttacctcttatggtaggaggacgtcatgagaaggctgcatgctgtcccagaacagatgttttaatctcctggtaaaatcaataacatcctgaggattcagctcgtggaacatgaaattgtgttaaaaacagacgaactgtggagctggggttaagagcactgactgttcttaccgaggactagtgttcaatacgtaacccccgatggcaatctataactccaattccaataatctgactcccttttctgacttctgggggaactgctgctcagggtgtaagaaaaacatctatgcacacgaaataaaaccaaggggaaaataggtaaataattaggggataaaatggctaa

SEQ ID NO: 6873 - DNA, 600 bp, Cricetulus griseus
cgcggtttcgtctcaaacctctccctgcgaggaggagggcctgccgacggccggtccctttgcaggtgaaggaagaaactcttaattctggaagtagcgactcaataccatggccagcctcctaaatgaagatccagaaagaagtcgaatcacatacgtgaaaggggatcttttcgcatgttccaaaacagactctctagcccattgtatcagtgaggactgtcgaatgggtgctgggatcgctgttcttttcaagaagaaatttggaggggtgcaggaactgttaaatcaacaaaagaagtctggagaagtggctgttctgaagagagatggacgatatatatattacttgattacaaagaaacgggcttcacacaagccaacatatgagaaccttcggaagagcttagaggctatgaagtcccattgtttgaagaatggagtcactgacctctccatgcccaggattggatgtggtctggatcgtctgcagtgggagaatgtgtctgtgatcattgaagaggtgtttgaggcaacagacatcaaaattaccgtgtatacactctgaacagatgaagaatttggatgagcccgtggctt

SEQ ID NO: 6874 - DNA, 629 bp, Cricetulus griseus
  misc_feature (347)..(366): n is a, c, g, or t
ttgttttcatatcagcatatctgtgctatgttagggtttttaaaaaaaaaacaaagctattcccctgctggtttttatggcagtaccttattttgacactagggggcaggagctctcctgctccaatcactcatgggaacatttttccaattgcagtgttatgttgtggtttcagtgtttatcagtagattgacctgtagtaagtggcagaataaaagcagaaatgtcccttttcagtgtgtgttaataatgttgcttgatagtagtcttcaaaaaatgccttcaacttttattatttctgaaaataatttgaaacttgatcatgaagctccagctaaaatccagannnnnnnnnnnnnnnnnnnnatttgtttgtttgaggtgggtgtggtggcttcacaccaataattcctacactcgtggaagcgggagagtcaggcatttggacccagcctgggttacacatttttttgtcacatgatttgtgatttgaccttggcagtttccttgatcttttaatgtaaaggtcttaaaacatcaaaatattttattggagtagtcctgttgactaagaaaataaaattcagccaggcatggaggcttgtttccataattttgtacctgggaag

SEQ ID NO: 6875 - DNA, 147 bp, Cricetulus griseus
ggggttggcgatctctggtcataacgacgaagcgctatgtgaacatgacttcgcagacgcagaagctggcttgccctgcactcattaaggtgctgcggcttgaggtgagacagccttgcgagccaccagcccaggaactctgtggcc

SEQ ID NO: 6876 - DNA, 600 bp, Cricetulus griseus
aaaacatatttgaaagccacctattgattgctccttgccacccctttttctgcagcagcaaatacttgctatgctttttgtacctggaaagatgtttaaaataaggagttttgatgctagtggtatatatatgcttttgttgaaaacatgaaattctgtcttaagtgtatcaataacatctctaactttatttcatcatattacagtatatttttggatagatactaggtaataaggaatattgcaaggaaattatctacatgctaaaataaccacatttgccatttggtaacaataaatttgtttcaaatgccactttaaaaacaaatataattcttcctacacatttgtttatattcaatataatataatgtctgaccccagcactgtatgagccaagcacatgtttttgtcctgcctgcctttacacagcttgcccacctgtatataatagtagtacactattaaattagagcacatgcaggttcaaagagacacacagtgaactttaaagttcatcacgtcaggaccaataatcagtcatctaaaataatcctgccatatcatattttcaacatgatactacatacacctaataag

SEQ ID NO: 6877 - DNA, 609 bp, Cricetulus griseus
agcaaatcttgaagactatacaccattgtagaacaaaggattgtgtgactctgttgaggtttacattcctcctttggtagcatgcagagtgccttcctgtatcaaaaatgctaacacatgatgtgaaggctctatgtagataccagttcaacatccacatgttcaatgagttgtataggtattgttttaagcaatggggccttggcatcagtttgtggagagcaaaacgtaggttatttgtgggttcctatgtggtccctttggccaataacttaatttagatgtaattcaatctttgtactggaagcttcatttgataactagagatggccaattgaggctctgtctctccattatttggtgatttcatttagatcatctttaggtatgtatatattttaggaagctactactatattacccattaaatggctctttattttagctctctcttcctatattcccttcattgttctctgtagcacaaattctaattgatcttaataataaaaaccctgagtcaaatataggggtaaatgctgaaagatcagagaagcagagcagccagagcagttgttacctctactgaatccttagacaaaagggcca

SEQ ID NO: 6878 - DNA, 600 bp, Cricetulus griseus
tgctactgttacctttatcaactatttcatttttcctttttaaaagatgatattacttgtcctgcagtggacaatactgtacaaagaaaacatctgaggagagagattgtgtctgtaacattcctcatggcataattttctgaacttctggctgcaattaaagtactaatgggatgggcctttaggtttttgtttcacagtagagaaaatgcttgcattagataaagcagctaggatacaggtaagtcctacttgtatttgggttcaaagacagaagtgtgtgcatgctaggtacatctgacaacagaaatacagaataaaggacagtagatggttgtgcttcatttctgaactcttcagtgactgaaatttattagtatttacattatagctggctttccctagtgatcaaattcacttctcaagtttcttttgagtacaaacttgtttaaataacaggctattttattggtatatttctctgttctacctgttagccatgttctactaaataccagctttggcatcatcacttgaagaatcaggtgcctgtggtgcagagtacttttgcatgtttaatacccctaatttgttctgctg

SEQ ID NO: 6879 - DNA, 600 bp, Cricetulus griseus
  misc_feature (510)..(525): n is a, c, g, or t
gagtatgtgcccgagacggtgtaccgggtggcccggcactttaccaaggccaagctgattatccctatcatctatgtcaaggtgtacatgtaccagctcttccggagcctggcctacatccactcccaaggtgtgtgtcaccgtgacatcaagccccagaatctgcttgtggaccccgacactgccgtcctcaagctctgcgatttcggcagtgcaaagcagttggttcggggggagcccaatgtttcctacatctgttctcggtactaccgtgccccagagctcatcttcggagccacagattacacctcatccatcgatgtgtggtcagctggctgtgtgctggctgagctgcttctcggccagcccatcttccctggggacagtggtgtggaccagcttgtggagatcatcaaggtactaggaacaccaacccgggaacagatccgagagatgaaccccaactacacagagttcaagttcccacagatcaaagctcatccctggacnnnnnnnnnnnnnnnncggacgccacctgaggccattgcgctgtgctcgagcctgctggagtacactccgtcctcaaggctctcccccctg

SEQ ID NO: 6880 - DNA, 600 bp, Cricetulus griseus
  misc_feature (481)..(505): n is a, c, g, or t
aggaaggaggccagaggaattgggtccaagtgttctgtaacggggccgtgcccacggagctggccctgctatacatgatagaaaacggccccggggaaatgcccatagactttgccaagcagcccactgcttcctggatgtgtttgtctctcttggctgcactggcctgttctgctggtgatacctgggcttctgaggttggcccagtgctgagcaaaagctcaccttggctaataacaacctgggagaaagttccagttgggaccaatggaggagtcacagtggtgggactcgcctccagtctcctcggtggtacctttgtgggcctggcctacttcctcacacagttggtgtttgtgagtgacttagacatctctgctccgcagtggcccattattgcctttggaggtctggctgggttactaggatcagttgtggactcatacttaggggcaacaatgcagttttctggcctggatgnnnnnnnnnnnnnnnnnnnnnnnnncccagcccgagagaccaagcacatagcagggaagcccatcttggataacaatgccgtgaacctgttctcctctgttttggtcgccctcttgctcc

SEQ ID NO: 6881 - DNA, 600 bp, Cricetulus griseus
  misc_feature (383)..(403): n is a, c, g, or t
gaaggtcagctagttgcttctcaatctctctgagctaataggttttcaccccagcctctgactcatgaatcttattgataaatagaatgatagagatttaattaaaaactacttttggtggcaacagaggcaggagaattcatcaggacataaaaatcccaccaggccactgcctgaaaaaaacaggtcagaaactgtagagccacagttactggctgaaacagcagtagattcaggtgtagctgttgtgccattgtgctggtagaaaaacaacattttggtacccagtgtgaggtatcaaatgtaagaagtctttctttggcccaccagttcccgaataatgacacagagacttttttttttgttattggttggtttttgtnnnnnnnnnnnnnnnnnnnnnacagtcctggctgtcctggaattcactctgtagaacagtctcgccttgaactcacagaaatccacctgactatgcctccagaatgctgggactaaaggcatgtaccaccatcacctggtgagactttattatgaaagcttaggcttattcccaactagctattaaaacttaaattaacctgtgtatattaatctaca

SEQ ID NO: 6882 - DNA, 560 bp, Cricetulus griseus
actgggagagatgacagaactggaaggcatggcgggggaaagatgtagaaacttagtgcagtggaaactccctggaatctatgagagggacaccaactgaaatctcctagtaatgggggatacagagcccaaactggcggcaattttacaactaggcaaggctcccagcagttggacagggacatcaacccagacagaaaaccttcgacttacaatctgtccctcctgcaagacatgctggggcaatggtgacagagaactgactaaacattaggcagagtcaggggaactgaagaggggaaggaaggattgtaggagccagagggtttaagaacactatgagaatgtgggccacagaatcaactaagctgggctgatatcatctcacaaggactgaagcaataaacagggaccctgtatgtatctgagctaggtcctccgcatacatgttatggttgtgtagactggtgttcttgtgggactcctaacaatgggagtggggggagcactatctctgactcctttgcctgcacatgaaaccctttttctcctactgggtt

SEQ ID NO: 6883 - DNA, 594 bp, Cricetulus griseus
  misc_feature (71)..(99): n is a, c, g, or t
  misc_feature (134)..(152): n is a, c, g, or t
  misc_feature (221)..(244): n is a, c, g, or t
  misc_feature (442)..(464): n is a, c, g, or t
ccgatctcacctaatgtctacgcttctatgttgacaacgcttaatagtctatatagttatcataacagtgnnnnnnnnnnnnnnnnnnnnnnnnnnnnntatgcattcaaatcctatcggaattctggtgctannnnnnnnnnnnnnnnnnnaacgcgcgaccctacttgtagtagggtcatacacttacggatcagactatgtaaaagacctgaccctgnnnnnnnnnnnnnnnnnnnnnnnngatctctcatactactacctctaacctgattataatctaacaaagatgtatgaattactgtcacagcgcacagattgttagtcaatactgtagctatagcaactctatgacaaatgaacgaaacaggcataggactctaccagacattggatattgatccactatctacatcattaatcatattagatatctgactannnnnnnnnnnnnnnnnnnnnnngcaaaactatatttaaaaagaaaccgtctacaacaagaaacggtatacttctatactaattattgtacaaactcttgtaatccccacattttcagcatacgagcttatactatgttatatgctattcgaa

SEQ ID NO: 6884 - DNA, 368 bp, Cricetulus griseus
aagatgagcggtatttaaacctggtgctggagtatgtgcccgagacggtgtacctggtgggccgacgctttaccaagggcaagctgattatccctatcatgtatgtcaaggtgaacatgtaccaactgtttcagagcctgggctacattcactcccaaggagtgtgtcacagtgacatccagccccataatatgcttgtggaccccaagactgacgtcctcaagctttgcgatttgtagcagtgcaaaactagtcggttgggtgggagcccaatggttcctacatatagtactaggtactaccgtggcccgaacaggtcatatttccgagccgaaggattacacactcatccagtctatgtgtggaca

SEQ ID NO: 6885 - DNA, 600 bp, Cricetulus griseus
  misc_feature (418)..(437): n is a, c, g, or t
atgatggtccctcttcttcaatctcagcgctcaagcgtctggaacggagccagtggacagataagatggactttaggtttggttttgagaggctgaaagagcctggagaaaggactggctggctcatcaacatgcaccctactgagattttagatgaagacaaacgcttagtcagtgcagtggattactactttattcaagatgatggaagcagatttaaggtaagccctcgaccaagaaaactaaatcctacccatgaccagtaattgctctaaaatagggggtattcattcactttgtgtcagggaggaaatgggagggtgtaatgtgcaattgcttgcaacccatcaagagcatggctactatgaacttcatcagtcacatttaaaatatcccgagggaaggtggctcaggaggnnnnnnnnnnnnnnnnnnnntgttcttgcctgtgagagatgtgcagatctaaatttcatgtatgcagtatctttaaagagctgtcaaaggggctggagaaatggcccagtggctggtcttccaggggatgcaggttcaattcccagccacctacaaggcagctaacagctgtctgtaactgtt

SEQ ID NO: 6886 - DNA, 540 bp, Cricetulus griseus
aagcaggctgcaccactggagaatggtgcgacagaggaggaggaacccatcccgcccatgtccagttactgccttctggctgagaattcctacgttaaagtgacatacgacatccaagccagcctacagaaggacagccaagtgactgtgtcagtcatcctggagaacaagagcaacagcttcctgaaaaacatggagctgaacgtgctggactcgctcaacaccaagatggccaggccagagggctcatcagtgcatgacggtgtgcctgtgcctttccagctaccccctggtgtctccaatgaggcccagtttgtgttcaccattcagagcattgtcatggcccagaagctcaaaggcacactgtccttcattgccaaggacgacgatggggccacccacgagaagttggacttccggctgcactttagctgtagttcctacctgatcaccactccctgctacagtgatgcctttgccaagttgctggagtcaggagacctgagcatgaactctatcaaagtcgacggcattagtatt

SEQ ID NO: 6887 - DNA, 214 bp, Cricetulus griseus
  misc_feature (86)..(103): n is a, c, g, or t
actgtgctatctttgatctcacctaatgtctacgcttctatgtttaaaaagtataatactctctatatttattatagcagcaatcnnnnnnnnnnnnnnnnnnattattagtatgtattcaaatactatatacattctcgtgtttgcaacatgcgacgccgaattaggcttagccctactagtagtaacgacaaacactcacagaacatactat

SEQ ID NO: 6888 - DNA, 600 bp, Cricetulus griseus
atgcactttccccatatgtggggcactggcttcaaacaattcagttcagtaccattatttttcaatctcatgtttccttcgttagtaggtggtatagtacagttatgggaaaatggcgcattgcattgacacattggtagttccatggaagttatgtaggatgtgcatgtactatttgataatattttcttttgctttactgcctttacaaacagcaaaagtgtaaatttgtgccccttacatagtactcttatttttggtagtgttggtctaggtcacttacttattgaggagaccccacagagcaagtgcatcctagatatcaccctaaaacataccttccacatgatgaacaactattatatataattaaatattgctgcttatttttctgttggcctccccccagtttttgggcattttgttctaaacaactattttttacaattaaaagtgtaatatcaagataaaaatctggacttttgcttttcctggcactcaaactcaagactgggtttgaggagcaaatctgggttcataactgacaaatttgaaggagcacgtaagaaatggaaggcaggtaaagatttaaaccctaca

SEQ ID NO: 6889 - DNA, 629 bp, Cricetulus griseus
cattgtgtctgtgtcacagcttcccttcaggccactagagatgtatatttggatgccggtgagctgaggaggagacccccaagaaagggcggtcctcgagccttgtatgtacccatggaggggagtgactttgtgagggtcagcaatgtttactcatgcacaccctcctttcttgtgatattgacagccatcttccttgagtgaggtgtaaagccctcttaagatttttcagtaccccactcccaaagaatgtttaatatgtaaaaacattgcttgaaaagttgtctaccagtgaatttggggatgatctagggccagtaccacagctcctgcacagacaaccaagtcctctggcttaggagagtacaagagagtagccaaaagagtatagtacccaaggctcttacccttatcttggccagtgtctgggcagagcccagtcagtgcatactttcccctataattcttaggttacaaacttgagtttcagggaatttcagtcagcaaccggtagagtgaataaatacttggttaccagcctaataatgtgaactgctacacttatttttattctttaagaacacaaagactttatgcagatactttaactataaattaatgtaaaatgg

SEQ ID NO: 6890 - DNA, 600 bp, Cricetulus griseus
cccttcggcaacataggggcagcccatgcatgtcagcctgtatcacagaaggaaaagcgccaggtgcctgtgtctgcgccgatctgaagagctgtgcatgcagtatagcaggccaaggtctgagccacagcagcatttttatttgagattttgataactgtttatatgtgttgaaaaccaaaatgacatctttttaaagcttgtccataagtaaacatagatgtcttttatagtggaaaaaacacgtggggaaaaaaatcatctattttgatgcagcgtttgataaatgataaaacacccgacacctcactctttatactgcacagaatgaatgaggaggtctgggctggggagacgaaggtcaatgctgtttttgttttcttttaggatcattcccttttaccagcttttaaccgtctgatacccatagcaggcaaactctcctagttaacatagttaagttcagcacttgtctcgtttaatgtcaaggtttgcattttctacgggcagtctccttcctcacaaacccactgtgcaggtgctattgttgctcttagaaatattttcagaaatgttatcttctaagtgaaatttctagcc

SEQ ID NO: 6891 - DNA, 538 bp, Cricetulus griseus
tagcagacctaagctctcacagaggagtcagccctcagatcttgtttttgctcaactgagaggaatccatgaggtgctatctggcaggattaagtggattctattgctttggttctcctttccctgaggacctgatatttttttatgtcctcctagattttcttggtttgggtatgttgaggtttgttgagaaggaggttgaagcaaagttccaggagcgaaattacagtgtgttaagagtgtggggaaaattagttttatttttccctacatgggatacaacactgtgaaattcagtcttcaacagaaaggccctgcagttctcctaaaacatagttcttatttctttctttaacaaagtttaagctagtgttaataaattaaaagagaaattgcttgtctctccacctcagctttgttttatgcccgtttcatatcgttgtctgtgctgtaattcatacttttgataccatttctgatgtgtaaagtcggctgtcttgtaaatatcttataaagagttcaattgtaaataaactat

SEQ ID NO: 6892 - DNA, 600 bp, Cricetulus griseus
  misc_feature (371)..(390): n is a, c, g, or t
taacaacttatatgcttttattggttacaaaaatagagggaaagggcctgatgcattagacttaccggacggtatgaatggttcccaaggcagttgtctaagatgaaagtacaagtgaacccaagtcttgtcgttacccctgttaattttgtgtgtgtcatttgctgtatgaaagggatataatgtgtacttaggagtagttcctactttgtagtattttttatttgggtcaaaataagcttcagtgttcataaatatctgctcaaaattgttactttaatttcaggtttttttgtatgtaaattgccttaaattgatgctccctttcaagtgtactcatttgttctatttagacaatttagttgaacttnnnnnnnnnnnnnnnnnnnnaagggtcgaacccttgatataagaaagtggccaaaggacaagttttatggcttgtgggaaatggttgaaactttaactctttctcttacggattatatgccattattaggacatgtcccatatacgcggatgtttaagtttaactcatactcacaagcgatcacaaaaagcatattaaaataacgtggatggagctcttcgtggggaggg

SEQ ID NO: 6893 - DNA, 560 bp, Cricetulus griseus
aaacatgaggggtttttaaacctggtgctggagtatgtgccctaaaccgtgtacctggcggcccgagactctaccaacggcaagctgattatccctatcatgtatgacaaggtgaacatgtaccaactctttcggagccttgcctacattcactaccaaggagtgagaaacagttacattaagacccacaaactgctagagtaccccaacactcccgacctactagctatgcccattgtatcagtgaaaaacagcttggactcggggcggagccccaacggtttccttacatacaattaatctggaactaaccgtgcacgccacattgttatactttaggaaacaccaagacttagcacaatcatgcctatccattgtagacgagacaacgtgggcatgactgttctaggtaagcagcatgccctaattgaaccaggccctaatatctcacctggcaccactatggacgaaggtctcagcattgatccgcaatagggtcatggttgtcccgcatgctccaacccacaggtaacacgatcgcgattgtataaatccccacc

SEQ ID NO: 6894 - DNA, 420 bp, Cricetulus griseus
tgcttctgtggtctttgatagagttgaagacagatagttatggttataattttcttcacttattataaaaaataagttacccttctttttatttagacaaaaaagagagatgatgggggaaatacttctgtgtatgtttataaataaagtgcttgcttggccaatgagacagcaggttaggctggactaggagtcaaagaggattctgggaaatgtagtagagaagtgatgttccagacaggaagtgacatagcaaggagactcatatttaagaagaggaaaaaggaaatgttgctctctttcccctcggctcctgctccagcgggaagatgtgatccaccagctaggagggacgccaataaggcgtgcgataagataaggcttataaaatatatagatgtatgatgatggatactgagc

SEQ ID NO: 6895 - DNA, 307 bp, Cricetulus griseus; identical to SEQ ID NO: 3253

SEQ ID NO: 6896 - DNA, 206 bp, Cricetulus griseus
  misc_feature (120)..(120): n is a, c, g, or t
aagctgaagcagttccatgcctatcccaagactctggaggacttccgggttaaaacctgcgggggcgccaccgtgaccatagtcagtgggcttctcatgctcctgctgttcctttcccanttgcagtattatctcaccacccagggcatcctgagctctacctggacaactctcggggagataaactgaagatcaacatcgatgtt

SEQ ID NO: 6897 - DNA, 114 bp, Cricetulus griseus
tcaaatcggaccctgtaaaagctgtaaaatgataacagagcaacccgatagcagaaggggcaactcttctgttggattttctgtgttgcagcatacaagcaatgatccatattg

SEQ ID NO: 6898 - DNA, 213 bp, Cricetulus griseus
  misc_feature (176)..(176): n is a, c, g, or t
ccctatacctttccaacatccctcagcaccatcaactttgatgaggttccccccatggggtgaccatcggggcagatctcaaaccagccttgggctcgcaccatcctggcccaaaccttgggccctccttgcctggggccagctctgggtcaacccccaacccctgtgctcattgnctagcgcccaggggccctcccccaagcgcctggggcc

SEQ ID NO: 6899 - DNA, 236 bp, Cricetulus griseus
tgaatattgagtttgaagcttattccatctcagataataattatggcggaatcaagaagttactgcgacagcttttcctaaaagctcctgtgaacacctgggagaggtaacagatctcttgattcaacagatccctatttgggagtggtgattaagccaacggatatttcataagaccgcgatgatgaagtatatgaacatgagatcttccgcttcataagcctcttaaatttaac

SEQ ID NO: 6900 - DNA, 218 bp, Cricetulus griseus; identical to SEQ ID NO: 3258
  misc_feature (140)..(140): n is a, c, g, or t
  misc_feature (174)..(191): n is a, c, g, or t

SEQ ID NO: 6901 - DNA, 430 bp, Cricetulus griseus
  misc_feature (115)..(115): n is a, c, g, or t
  misc_feature (118)..(118): n is a, c, g, or t
  misc_feature (161)..(161): n is a, c, g, or t
  misc_feature (173)..(173): n is a, c, g, or t
tggggtgcaagcatatattataaaataatcacctcaaaggatatttaagatatccatcattttatacatttaccaacccccacctgtagggagacactgtacccccccctcctantancttggacaggggtgctgggacatgcccgtgagggcgtgggcanggaaagtctaanctgacatgggaaccattcttaagggaccacacacacacacgtgaatagcccttctttctggcccctctctctgggctggctgccttgctgcccctggcatgctctggcttgcgtttgggatgatgtttatctgaataaagaaaccttacccttacggactgcagatcgatctcatcacccaccccatgccttcttcgtctcaacctaatgaatacataaagtaacttaagttactgacaatatggggtcaatcccta

SEQ ID NO: 6902 - DNA, 104 bp, Cricetulus griseus; identical to SEQ ID NO: 3260

SEQ ID NO: 6903 - DNA, 419 bp, Cricetulus griseus
  misc_feature (37)..(83): n is a, c, g, or t
  misc_feature (111)..(135): n is a, c, g, or t
  misc_feature (139)..(163): n is a, c, g, or t
  misc_feature (195)..(218): n is a, c, g, or t
  misc_feature (221)..(239): n is a, c, g, or t
  misc_feature (261)..(308): n is a, c, g, or t
  misc_feature (310)..(326): n is a, c, g, or t
  misc_feature (341)..(361): n is a, c, g, or t
  misc_feature (363)..(375): n is a, c, g, or t
aatgtctacgcttctatgtgtgagaagggataatacnnnnnnnnnnnnnnnnnnnnnnnnnnnnnnnnnnnnnnnnnnnnnnnaataggtatgtattcaaatcctatcggnnnnnnnnnnnnnnnnnnnnnnnnnaccnnnnnnnnnnnnnnnnnnnnnnnnntagtgtcaaacacttacgggacagactatggnnnnnnnnnnnnnnnnnnnnnnnnggnnnnnnnnnnnnnnnnnnngtcatactcctacctctaaccnnnnnnnnnnnnnnnnnnnnnnnnnnnnnnnnnnnnnnnnnnnnnnnntnnnnnnnnnnnnnnnnnactatagccactttnnnnnnnnnnnnnnnnnnnnngnnnnnnnnnnnnncgacattttatatgggtccactatcttcatgatgaattatatta

SEQ ID NO: 6904 - DNA, 443 bp, Cricetulus griseus; identical to SEQ ID NO: 3262
  misc_feature (36)..(36): n is a, c, g, or t
  misc_feature (39)..(57): n is a, c, g, or t
  misc_feature (203)..(203): n is a, c, g, or t
  misc_feature (228)..(228): n is a, c, g, or t

SEQ ID NO: 6905 - DNA, 150 bp, Cricetulus griseus
cgcggggtgtctataaaacgtggatgggaccctgactgccccgcggcgataaaattacaaaagaaatggatgactttctacaaaaattgaggcgacggaccaaaattggagtggtacgggggtcatattttcaaaaattacaatatcggc

SEQ ID NO: 6906 - DNA, 419 bp, Cricetulus griseus; identical to SEQ ID NO: 3264
  misc_feature (34)..(34): n is a, c, g, or t
  misc_feature (42)..(42): n is a, c, g, or t
  misc_feature (65)..(104): n is a, c, g, or t
  misc_feature (211)..(211): n is a, c, g, or t
  misc_feature (237)..(237): n is a, c, g, or t
  misc_feature (243)..(243): n is a, c, g, or t

SEQ ID NO: 6907 - DNA, 144 bp, Cricetulus griseus
  misc_feature (97)..(97): n is a, c, g, or t
aaaatcactcatagaatgatggaaaaggcatgccattgggaggattggggtataagatcagagaactgaacacctgacattgctgtgcaaggtccantttcaaatttcaacaatatataagaaacaataaagataaatgccata

SEQ ID NO: 6908 - DNA, 219 bp, Cricetulus griseus
  misc_feature (83)..(123): n is a, c, g, or t
actttaatcacttctcgggactgggctatttcaatctcacctaatgtctacccttctatgttttagaagggtaatactctccnnnnnnnnnnnnnnnnnnnnnnnnnnnnnnnnnnnnnnnnncataggggtgtattcaaatcctatccgattctggtgtgtgcagcatgcgaagccccactaagcttggccctacttgtattagtgtgaaacacttac

SEQ ID NO: 6909 - DNA, 303 bp, Cricetulus griseus; identical to SEQ ID NO: 3267
  misc_feature (268)..(268): n is a, c, g, or t

SEQ ID NO: 6910 - DNA, 215 bp, Cricetulus griseus; identical to SEQ ID NO: 3268

SEQ ID NO: 6911 - DNA, 216 bp, Cricetulus griseus
  misc_feature (60)..(79): n is a, c, g, or t
  misc_feature (81)..(101): n is a, c, g, or t
  misc_feature (115)..(172): n is a, c, g, or t
gaccaagagttgattaccgttcatacactataggagaaacttgaaacgtgggtattgtgnnnnnnnnnnnnnnnnnnnngnnnnnnnnnnnnnnnnnnnnnctaccatgaggggnnnnnnnnnnnnnnnnnnnnnnnnnnnnnnnnnnnnnnnnnnnnnnnnnnnnnnnnnnggggaccactctagtagaatgaatctgacgcggattctctgtaa

SEQ ID NO: 6912 - DNA, 351 bp, Cricetulus griseus
  misc_feature (108)..(108): n is a, c, g, or t
ctgggactgtgttctaaaaccctgtcctcacaaaaagagataatttcaaatgactcgggtcacattctattcacattactcattaaatggacaggattcctgatagancatacttttcaagaaacattatgactcaagcatattaaaaattagggttcacttaaatataatactgagctataatggaagagtgaacaattcatggaaatattgatcttactaagttagtttcaagtaccagaatttagcaaatttatatcttttcacataccaaggatttatgaaagagcaaaggcctaacaattataaaaagagttgagggacaggaactctttgaatttcttctctctg

SEQ ID NO: 6913 - DNA, 296 bp, Cricetulus griseus
  misc_feature (35)..(87): n is a, c, g, or t
  misc_feature (94)..(114): n is a, c, g, or t
  misc_feature (173)..(194): n is a, c, g, or t
  misc_feature (204)..(225): n is a, c, g, or t
  misc_feature (227)..(241): n is a, c, g, or t
aatgtctacccttctatgtttaaaacggataatannnnnnnnnnnnnnnnnnnnnnnnnnnnnnnnnnnnnnnnnnnnnnnnnnnnngtatgtnnnnnnnnnnnnnnnnnnnnntggggcttgcagcatgcgaagccacactgagcttggccctacttgtactactggcaaannnnnnnnnnnnnnnnnnnnnnaaaaacccgnnnnnnnnnnnnnnnnnnnnnncnnnnnnnnnnnnnnnatactcctacctgtaacctgagtatcatccaacaaaaatgcgtgaattaatggca

SEQ ID NO: 6914 - DNA, 424 bp, Cricetulus griseus
  misc_feature (111)..(111): n is a, c, g, or t
cctgtgaggggaatattgcacagtatcccttctaattccattgctgagcatttagtatccttgccttaccgagttcaaaggggatgggaaagtaaagtgtctttttcttantgcattttcagttatggggatgtgaatatagacagagggctctgcaccaactaatggagacttgacttccgtggagaggtagctgtaatattgggtttcactagataaactacaacatttctttggtacagtttgtaaagtagttttgcacacattcaactcttgattggggtgaaaatcctttcagtcaagtaattagatacataggcaggcgtattcttacagcacatgagagaactgagactcaaacatgaaatggggcaaactagctgggaagttgcagagctaaagcaatccacacatctttcatgcc

SEQ ID NO: 6915 - DNA, 227 bp, Cricetulus griseus; identical to SEQ ID NO: 3273

SEQ ID NO: 6916 - DNA, 343 bp, Cricetulus griseus; identical to SEQ ID NO: 3274
  misc_feature (122)..(122): n is a, c, g, or t
  misc_feature (297)..(297): n is a, c, g, or t

SEQ ID NO: 6917 - DNA, 287 bp, Cricetulus griseus
  misc_feature (29)..(87): n is a, c, g, or t
  misc_feature (104)..(116): n is a, c, g, or t
  misc_feature (118)..(133): n is a, c, g, or t
  misc_feature (171)..(207): n is a, c, g, or t
  misc_feature (209)..(240): n is a, c, g, or t
aatgtctacccttctatgtttaaaagggnnnnnnnnnnnnnnnnnnnnnnnnnnnnnnnnnnnnnnnnnnnnnnnnnnnnnnnnnnntatgtattcaaatcctnnnnnnnnnnnnngnnnnnnnnnnnnnnnnaccacaatagcttggccctacttgtactactgtcaaannnnnnnnnnnnnnnnnnnnnnnnnnnnnnnnnnnnngnnnnnnnnnnnnnnnnnnnnnnnnnnnnnnnnatactcctacctctaacctgattatcatctaacaaaaatctatgaat

SEQ ID NO: 6918 - DNA, 344 bp, Cricetulus griseus; identical to SEQ ID NO: 3276

SEQ ID NO: 6919 - DNA, 288 bp, Cricetulus griseus; identical to SEQ ID NO: 3277
  misc_feature (27)..(27): n is a, c, g, or t
  misc_feature (164)..(164): n is a, c, g, or t
  misc_feature (185)..(185): n is a, c, g, or t

SEQ ID NO: 6920 - DNA, 410 bp, Cricetulus griseus; identical to SEQ ID NO: 3278
  misc_feature (106)..(132): n is a, c, g, or t
  misc_feature (173)..(196): n is a, c, g, or t

SEQ ID NO: 6921 - DNA, 382 bp, Cricetulus griseus; identical to SEQ ID NO: 3279
  misc_feature (86)..(86): n is a, c, g, or t

SEQ ID NO: 6922 - DNA, 121 bp, Cricetulus griseus; identical to SEQ ID NO: 3280

SEQ ID NO: 6923 - DNA, 240 bp, Cricetulus griseus
  misc_feature (34)..(65): n is a, c, g, or t
  misc_feature (67)..(80): n is a, c, g, or t
  misc_feature (109)..(152): n is a, c, g, or t
gggggtccgggctccttcaagtatgcctggggcnnnnnnnnnnnnnnnnnnnnnnnnnnnnnnnngnnnnnnnnnnnnnnctccctggggaaatttgagaccagcaaannnnnnnnnnnnnnnnnnnnnnnnnnnnnnnnnnnnnnnnnnnngggaacatgattactgggacttctcaagctgactgtgctgtcctaattgttgctgctggggttggggaatttgaggctgggatctcca

SEQ ID NO: 6924 - DNA, 401 bp, Cricetulus griseus; identical to SEQ ID NO: 3282
  misc_feature (116)..(116): n is a, c, g, or t

SEQ ID NO: 6925 - DNA, 600 bp, Mesocricetus auratus
gaggcaggtgagtttgggatgcacctccatctgtgtgggtcctgcacgcccagagaagcctggggagcctctcgtgctaggctggctcctcccaggaccatggaggtcactgtcctcagccctggcgggcccaggcagcagcatgagcggggctcagggatgcaggatgaggaccttagtattgggcacaactccagctgtcctcctggatcttctgggtgatgggattagagagagcctcagggaatgaaggctgaaggtagccccctctgagccatattttcacatgaagcctgactggggagagagaaccccgaggataggagaattggagtttatgcacgccaaaagttgcacagcccccgtggtatttcagttagtgagtgacagtcctgaggcataaggaggtcccttgccaggcgggaaagacttcttccccagtagtcacccaccctgcccatggctcctgatcaggtggagaaccctcaggtgtttgggttgagggagcccaggccctggctggaagtagcatctcccgatggagctgggatgatgcaggaagctcagaggctggctaggtgtgtcacacctatgtgggcc

SEQ ID NO: 6926 - DNA, 906 bp, Mesocricetus auratus; identical to SEQ ID NO: 3284
  misc_feature (323)..(389): n is a, c, g, or t

SEQ ID NO: 6927 - DNA, 346 bp, Cricetulus longicaudatus; identical to SEQ ID NO: 3285

SEQ ID NO: 6928 - DNA, 269 bp, Cricetulus longicaudatus; identical to SEQ ID NO: 3286

SEQ ID NO: 6929 - DNA, 204 bp, Cricetulus longicaudatus; identical to SEQ ID NO: 3287

SEQ ID NO: 6930 - DNA, 354 bp, Cricetulus longicaudatus; identical to SEQ ID NO: 3288
  misc_feature (41)..(75): n is a, c, g, or t

SEQ ID NO: 6931 - DNA, 354 bp, Cricetulus longicaudatus; identical to SEQ ID NO: 3289
  misc_feature (241)..(272): n is a, c, g, or t

SEQ ID NO: 6932 - DNA, 599 bp, Cricetulus longicaudatus; identical to SEQ ID NO: 3290

SEQ ID NO: 6933 - DNA, 548 bp, Cricetulus longicaudatus
cttcagtgcctgcatgtcagcctctaccctaggaaaggcttggctttgagaatccatgtgagatggggagaacagcacttcgttccattgtaagtaacaataggagacagatgtgtctccagcctcctgttgcagctttgcagacagccttatggactaggacagatgactcccagatctactcctgcagatcaccttcatattccttcccaagagcaccatcggcaactttcatccagtacaggacctgtgcaagggctcagtcaactgcagtacttcctgcctcttgactgtctagctagggagggccgaaatgctgagaggcctggggcactgactatgctgactttaagccttgactccacctgtcactggaaatgtgcaaacttgcctgagtctttacccaactgcctcagaactacagggttctgggtctccatgccgtctatgtaagatgccaggggcatgggaagctcacaggcagctgctctgaacatcttaggagaattgcttgaggaccacccccctgctgtgcacaatgtctggat

SEQ ID NO: 6934 - DNA, 537 bp, Cricetulus longicaudatus; identical to SEQ ID NO: 3292

SEQ ID NO: 6935 - DNA, 940 bp, Cricetulus longicaudatus; identical to SEQ ID NO: 3293
  misc_feature (324)..(342): n is a, c, g, or t
  misc_feature (377)..(393): n is a, c, g, or t

SEQ ID NO: 6936 - DNA, 1400 bp, Mesocricetus auratus
  misc_feature (170)..(184): n is a, c, g, or t
  misc_feature (812)..(938): n is a, c, g, or t
  misc_feature (1027)..(1042): n is a, c, g, or t
  misc_feature (1124)..(1145): n is a, c, g, or t
  misc_feature (1168)..(1194): n is a, c, g, or t
tcgctggccagtttgatcccatgattcctgatgcagagtgcctgaagatcatgtgtgagatcctgagttcacttcagataggcaagttcctggtcaaggtaaatgacaggcgcatcctagatggaatgtttgctgtctgtggtgttcctgatagcaagttccgtaccatnnnnnnnnnnnnnnncaaactagataaggtttcctgggaggaagtaaagaatgagatggtgggagagaagggccttgcaccagaagtggctgatcgcattggggactatgtccagcagcacggtgaggtgtgtctggtagagcagttgctccaggatcctaaactctctcaaaacaaacaggctgtggagggcttgggagacctaaagctgctgtttgaatatctaaccctgtttggcattgatgacaagatctcctttgacctgagccttgctcgagggctggactactatactggggtcatctatgtggcagtgctgctacagatgccaaccggagctggggaagaaccctggtgtgggcagtgtggctgctggaggcgctatgatgggctggtgggcatgtttgaccccaaaggacgcaaagtgccatgcgttgggctcagtattggagtagagcggatcttctccattgtagagcaacgattagaggctttagaggaaaaagttcggaccactgagacacaggtccttgtggcatctgcacagaaaaagctggctggaggagagactaaagcttgtctccagttgtgggatgctgggatcaaggccgagctgctctacaaaaagaacccaaagttactnnnnnnnnnnnnnnnnnnnnnnnnnnnnnnnnnnnnnnnnnnnnnnnnnnnnnnnnnnnnnnnnnnnnnnnnnnnnnnnnnnnnnnnnnnnnnnnnnnnnnnnnnnnnnnnnnnnnnnnnnnnnnnngaagaccttgtggaggagatcagaagaagaacaaatcagcccctctacgtctgctgaaggaagcagactagcagaggaagcaggattgnnnnnnnnnnnnnnnnaacaaaactgcatatgtacttaaatagtttgcacatttctgatccagcagaagactgaagggtggtcgggtacacgaggccnnnnnnnnnnnnnnnnnnnnnngttattatcggtaatcactggcnnnnnnnnnnnnnnnnnnnnnnnnnnngaacagaaaagaaaaaaaggccaggtgtacagtttcctagtcgggaatagggaggagcagtataggtcagtataggtggattaatcaagactgactcctaaactcctgtatgaacctgagatggcttcttgcagagccacataccagatgaatggatgcctccctacaacctgccgccaaaaagtccaataaatgtctcccccgct

SEQ ID NO: 6937 - DNA, 538 bp, Cricetulus longicaudatus
  misc_feature (200)..(221): n is a, c, g, or t
  misc_feature (435)..(510): n is a, c, g, or t
tgaaatttccttataattatggggggcactgattgctcaatggtaaagatcactttttacagaggatgcagacttggttcctagtacccatatggtgagctataatcacctgtaactcaagttgtaggggatccaatgccctcttctggtttctgtaggtacctacacatgaaattaaagaaaaaaaaaaaaactttacnnnnnnnnnnnnnnnnnnnnnntttacaattttacaaatgtttatatgggggcattgtttccctcctcctggccccatttctgagggtgcgagcactggcctcaccattagagcctttggtttccttttcagcatagaaagtacctcttagaccagagaagagatactggaggggtagttgaaaccttttgactttaggagtgttaaaaatgtcatctgagccaggcattggtggnnnnnnnnnnnnnnnnnnnnnnnnnnnnnnnnnnnnnnnnnnnnnnnnnnnnnnnnnnnnnnnnnnnnnnnnnnnnagagcgagtgccaggataggcaccaaag

SEQ ID NO: 6938 - DNA, 549 bp, Cricetulus longicaudatus; identical to SEQ ID NO: 3296

SEQ ID NO: 6939 - DNA, 1400 bp, Mesocricetus auratus
  misc_feature (320)..(338): n is a, c, g, or t
tgcaggaggagatctcagatctgactgagcagctgggctccactgggaagagcatccatgagctggagaagatccgaaagcaactggaggctgagaagctggagctgcagtcagccctggaagaggctgaggcctccctggagcatgaggagggcaagatcctccgagcccagctggagttcaaccagatcaaggcagagatcgaaaggaagctggcagagaaggacgaggagatggagcaggccaagcgcaaccacctgcgggtggtggactccctgcagacctccctggatgccgagacgcgcagccgcaacgaggcnnnnnnnnnnnnnnnnnnnatggagggcgacctcaacgagatggagatccagctcagtcatgccaaccgcatggctgctgaggcccagaaacaagtgaagagcctccagagtttgctgaaggacactcaaatccagctggatgacgcagtccgtgccaatgacgacctgaaggagaacatcgccatcgtggagcggcgcaacaacctgctgcaggcggagctggaggagctgcgggccgtggtggagcagacggagcggtctcggaagctggcagagcaggagctgatcgagaccagcgagcgggtgcagctgctgcactcccagaacaccagcctcatcaaccagaagaagaagatggacgcagacctctcccagctccagacagaggtggaggaggcggtgcaggagtgtaggaacgcagaggagaaggccaagaaggccatcacagatgccgccatgatggccgaggagctgaagaaggagcaggacaccagcgcccacctggagcgcatgaagaagaacatggagcagaccatcaaggacctgcagcaccggctggacgaggcagagcagatcgccctcaagggtggcaagaagcagctgcagaagctggaggcccgggtccgggagctggagaatgagctggaggctgagcagaagcgcaatgcggagtcggtgaagggcatgaggaagagcgagcggcgcatcaaggagctcacctaccagacagaggaagacaggaagaacctactgcgactgcaggacctggtggacaagctgcagttaaaggtgaaggcctacaagcgccaggctgaggaggcggaggaacaggccaacaccaacctgtccaagttccgcaaggtgcagcacgagctggatgaggcagaggagagggcggacattgccgagtcccaggtcaacaagctgcgggccaagagccgtgacattggcgccaagggcctgaatgaagagtagatcttgtgctacccaaccctaaggatgcctgtgaagccctgagacctagagcctttgaaacagcaccttaggcagaaacacaataaagcaattttccttcaagcc

SEQ ID NO: 6940 - DNA, 600 bp, Cricetulus longicaudatus
tctcggggatcttgtggggtctccgcccccctttccccggccaccagcctctccttgttcccagggatatctcgcccctcctgaaggaccccgcctccttccgagcttccatccgtaaagcagagaaatcttgacacatacacacactcatacagccctgttatcacaataagacatgtattggtcactcccaaaggtccttgtgcccgctgaggtcccctccctcaccctgtctgctcccccagacccaggaaaccataatgtgctttctattcctagagatatattttgggctttctagaagtttctacaaactcagagacactgttgtggattaacaaagtcctctgttgaagcccaagcccctgggatctcagaaggtaactgaatttggagatattcaccttaagtccacgcatggcggcaagatcgactacatcgcaggcgagtggccatgccaggccgtgctggtcccccactgtgcaggctcccctcccttcccttatgtcaccctcagtccatcccacacccatcccttctttcttcaacccctaatcctcttttagcactctgtttctcttgccttggtccctcgttgac

SEQ ID NO: 6941 - DNA, 600 bp, Cricetulus griseus
tctttgaacaagcaactcaaggaatgccgagcagccatagccccccggaaaagtaaaggtttacaggactggttaaagatctgcagagaactcggagggccacttactaatgcaggcttggcacagccatctcacaaacccaaaggcgccgaaatatgtctgcctgctttaactgtggaaaaacagggcaccttaaaaaggactgtaaagcccctgaaaggactagagaagtggagttgtgcaggcgctgtggaaaaggttatcatagggccagtggaatgcaaatccgtgggacataaaggtacgcttttaccccctacgagaaccttaactcccaaccaaaaaacggccgcgggcccatgtcccagggccctcagaaatatgggaaccagttccggaaaagcaactcagagaaggaagggactcccgaggacactccggagtggacctgtgtgccgcctccgacttcttattaaatgccccaaatcgaaatctgttcagcctgtctcaatccaatctccggggcctttaccccccccctcccccactaccattgggcttattttgggccgaggttccttgaccttacaaggactcatt

SEQ ID NO: 6942 - DNA, 117 bp, Mesocricetus auratus; identical to SEQ ID NO: 3300

SEQ ID NO: 6943 - DNA, 201 bp, Cricetulus longicaudatus
  misc_feature (64)..(115): n is a, c, g, or t
  misc_feature (145)..(158): n is a, c, g, or t
  misc_feature (160)..(172): n is a, c, g, or t
acagtgtgaataatgcacatgatggaaagagagatctgactcctgtaagttaccctctggctgnnnnnnnnnnnnnnnnnnnnnnnnnnnnnnnnnnnnnnnnnnnnnnnnnnnntgcacaagcaatacttgtcctctaaaatcnnnnnnnnnnnnnntnnnnnnnnnnnnnaagttttcattgctgccctattagaattc

SEQ ID NO: 6944 - DNA, 174 bp, Cricetulus longicaudatus
ctgcaggccctacccagaaccccaggcattccctgtgcaggcaccaggtgataatagcagctgcagggcaggcagaatatggggcatgtccctggtagtgggggacactgtgggaaggcttcaaagaaaacagtccaggtgacctgagaaattggaacagtagtgcccagagca

SEQ ID NO: 6945 - DNA, 600 bp, Cricetulus longicaudatus
atcctgacagctttgagactacagtgacagtgacatttcacatgcagacagacaaaccagggtggggccgtcctgcagaagcggctttcccaccggatgctctgaagtctgcctttcgtcagatccgagttaatcttctcccaaataaaccatgaggttaaagtccaggtttctgtgcctagagctggctggagtctggggggacagacagcaaccacagagtctgtgatgctgagagattttgtcctggctgcccaggggccaagctggccatcagaagtgttggtatggcctccactgtggagggggcagcagtacccagttggagagctttcaccaaaagttcctttacaaaccaggtgatggaaatttcctgtctctcacccagcacccatgagctgggccaaccaaagaaggccgttctctgggactgtttggtgactgctacccacacaggagctctgtgtcctagtcctgatcccttcaactggctgactggctgactcctacccctctcccccgttctgtcccatgtagataaatcccagagatatttcctggtttttcttgggacaagcaatgaatgctgaccatgaattc

SEQ ID NO: 6946 - DNA, 372 bp, Cricetulus longicaudatus; identical to SEQ ID NO: 3304

SEQ ID NO: 6947 - DNA, 390 bp, Cricetulus longicaudatus; identical to SEQ ID NO: 3305

SEQ ID NO: 6948 - DNA, 244 bp, Cricetulus longicaudatus
tcctatgctccccacctaccctccaaccacctgccagctcactccccagagatactgaggccctccacagggtcatcaaagtctgtcacatgatttgggggaggaccaggccctctttcctttatctgggctgaaatagtatccctcatagggaatggactcccaaaggccatttgtgctctagggataaacactggctccaaggttagaggtcccatagaatatcctggcctcctagctaaca

SEQ ID NO: 6949 - DNA, 388 bp, Cricetulus longicaudatus; identical to SEQ ID NO: 3307

SEQ ID NO: 6950 - DNA, 363 bp, Cricetulus longicaudatus; identical to SEQ ID NO: 3308

SEQ ID NO: 6951 - DNA, 600 bp, Cricetulus longicaudatus
tgagaaagaacagtactcagtttcatatggaaaaacaaaaaacccaggatagccaaaacaaccctgtacaataaagaaacttctggaggcatcatcattccttacttccagactccattatagaacccatagtcctgaaaacagcttggtattggcaaaaaaaaaaattgacagatagaccaatggaatctagttgaaaaccctgatatattaacccacaaacctatgaacaccttgttttttgtcaaagaagctaaagttatacaacgtaaaaatgaaatcatcctcaataaattttgttggcataactagattcggacatgtagaagattgaagattgatccatatgtataaccatgcactaaacttaactccaaatggatcaaagacctcaacataaattcagcttcctgaacctcctagaagagaaggtagatggaacaggagactgctttctgaacataaccccagtagcaccaaacattgggatgatctggccctgggtttttttggttggtagattttttgatgatggcttctatttcattaggggttataggtctgtttaaattgcttttctttcttgatttaattttggtt

SEQ ID NO: 6952 - DNA, 600 bp, Cricetulus longicaudatus
tgggttctataatggagtctggaagtaaggaatgatgatgcctccagaagtttctttattgtacagggttgttttggctatcctgggttttttgtttttccatatgaaactgagtactgttctttctcaaggtctgtgaagaactgtgttgtgattttgatggggattgcactgaatctgtagattcctttggcaagattgccatttttactatgatgatcctacctatcccagagcatgggagatctttccattttctggtatcttctttaatttctttctttaaagattcaaagttcttactatacaggtctttctcatttggttagtgttgccttaagatattttatgttgttagttgatattgtaatgagtgatctttctctggtttctttctcagtgcagttatcttctgcatatagtaggacttctgatttttttgagaatccagagaatcatcaggtcatacattgaaaaaacctgtactccaccaaatttgaaaatctaaaggaaatggacaattttctggatagatatcacttaccaaagttaaatcaagatgggctggagagatgctcagccgttaaaggcgaggctcac

SEQ ID NO: 6953 - DNA, 600 bp, Cricetulus longicaudatus
cacagcgggaagactgccctagctgcaaagatcgcagaggaatccaactttcccttcatcaagatctgctcccccgataagatgattggcttttctgagacagccaagtgtcaggccatgaagaagatctttgatgatgcttacaaatctcaactcagttgtgtggtggtggatgacatcgaaaggctacttgattatgtccccattggcccccggttctccaacctggtgttgcaagctcttcttgtgttactaaagaaggcacctcctcagggccgcaagcttctcatcatcgggaccaccagccgcaaagatgtccttcaggaaatggagatgctgaatgccttcagcaccaccatccacgtgcccaacattgccacaggagagcagctgctggaagctttggagcttctgggcaacttcaaagataaggaacgcaccacaattgctcagcaagtcaaagggaagaaggtctggataggaatcaagaagttactaatgttgattgagatgtccctgcagatggaccctgagtatcgggtgaggaaattcttggccctcttgagagaagaaggcgctagccccctggactttgattga

SEQ ID NO: 6954 - DNA, 1400 bp, Mesocricetus auratus
  misc_feature (510)..(539): n is a, c, g, or t
ttctacttgtcaaagcaatggacagtggagcaattccaggctacggtgtcagcctgtggactgtggcattccggaacccattcagaacggtaaagttgatgatccagaaaatactctgtttggctctgtcattcactactcgtgtgaggagccgtattactacatggaacatgcagaacacggcggggagtatcgctgtgctgctaatgggagctgggtgaatgacgagctgggcatagagctcccaaaatgtgttccagtctgtggggtacccactgagccctttagaatacagcagaggatattcggaggatttcctgcgaagatccagagttttccttggcaagtcttctttgagttcccgagggccggtggggctcttattggcgagcactgggtgctgacggcagctcacgttgtggaagggaactccgacccatcgatgtatgtggggtccacgtctgtgagaatggaaaacctggcaaacgttcagaagctcaccaccgaccnnnnnnnnnnnnnnnnnnnnnnnnnnnnnngggatgacctaagcacacggacaaattttgacaatgacatcgcactggtgcggctgaaagaccctgtgaaaatggggcccactgtttcccccatctgcctgccaggcacctcctcagagtacgaaccctcagagggtgatctgggactgatctcagggtggggccgaacagagaggagaaatattgttatccagctcagaggggcaaagttacccgtgacctctttagagaagtgccgacaggtgaaagaggagaaccccaaagcgagggcggatgactacgttttcaccagcaacatgatctgtgctggagagaagggcgttgacagctgtcagggggacagcggtggggctttcgctttgccggtccccaatgtaagggaccccaaattctacgtggcaggcctagtgtcctgggggaaaaagtgtgggacctatggaatctacacgaaggtaaagaactacaaggactggatactgcaaactatgcaggagaatagtgtccccagtcaggactaacccattcataccgccagcccctccccccaggacacagcaacgcattgctctcagaccctgtggtagtcccattatctcgcagtgatggagagaagatgcaggagtgccgttaacactgaacttgattgtcaagacacctgaatggatggagggtctgatcacaggcctgtgttgattactcaggtgtgaattccctcctgttattggtaacaacatggcagagactcctctgtcttgcaccattctgcagggtatcttaacctccgtttctttcacctgcttgattccatttataatccttggagtcctttatttacttacaataaagcatatttctaacctg

SEQ ID NO: 6955 - DNA, 600 bp, Cricetulus longicaudatus
  misc_feature (390)..(428): n is a, c, g, or t
catgcaggaccatcccctcagggttcttactggccatgcgaggcatctcagaactcctgccttttgttcccctgagcatcaaatgtcctccagaagacttggagcatttgctgagggccaaacacagacagatggtacccggggctggtctagaaagaacagtacagcatctgggacaatacagtacttgttttgtcacttaaacacagcctccctgagctgcctggtggagtcctgatacttcggccacatcagaatgccagctagactaaagagacagtagaggaagggcacagtgagggttggccatgaggaggtggttgagaacaccgactgaaggaatactcaagaggagagccctgacaaagcaggaggaatgtccagcccagnnnnnnnnnnnnnnnnnnnnnnnnnnnnnnnnnnnnnnncctgagtccttaagagcagacagtaagtgagatcagggtgagatcagaggaggtctgagaccctcagttagaaagatccccaagtccttcccccatacacacacctgcaagctgctaaaaacccactggagttggtgcctgggacttaatgaggtgcctgctgacatagcat

SEQ ID NO: 6956 - DNA, 350 bp, Cricetulus longicaudatus; identical to SEQ ID NO: 3314

SEQ ID NO: 6957 - DNA, 600 bp, Cricetulus longicaudatus
ttctgccatggagagccatgtaatttttgacgttctaatactgtgtccctgtctccaccgcctcactggcaggtgtttctcatcagctacacaggctacaaagactttacactgaacagtcaagcctcaggttcaagttatcttctatcttgctaagatgctgagactttgagtaaagtcacttttctcatgagactgtctctgttcacacagcccgacttacttatcaggcacttacaaaagatacatcagctccaaatccctctttattagagaagtcttctccctcatacagccagtaaccaactcgaaagacgactgtacccagcccttgatcctgtaaggagcactaaagaacatcccaactctgggaacagcaggcaagactgaggtggggcaccagactacaagactgaaacgtagggaggggttagggctctccacactgcctgtgttgtgtccaggccttctttagtcctcaccacccaatgccactgatgagcctttagactgcctcctctcaatgccatgggctggagcacagcacgtgacttatttgggtatgggtaagactagttcatagagcagtgacactcaacg

SEQ ID NO: 6958 - DNA, 271 bp, Cricetulus longicaudatus; identical to SEQ ID NO: 3316
  misc_feature (45)..(64): n is a, c, g, or t

SEQ ID NO: 6959 - DNA, 565 bp, Cricetulus longicaudatus
  misc_feature (372)..(373): n is a, c, g, or t
tcagctgactggctacatggccacacatgtgcgaattctcagcagatgcacctggaagactaagttgtggcctttggtaacctgaatcctctcaccttggagggggaaactagctgcctgccctgcacagagaaggattcagatactaagctaagacccaccatccccagactattgatgccttccctggactcagaggtgacagtatgcatctaagggctgtcacggaggaaaaggcagaggctaggattcccagccctgttcccaccactggaagaagcagtaggccccagcctacccctcctctgatgtttgctgttttgttgttgttgttaattcctcaccaggtggaaccagcactgtggggcttanntaagctcagccagctgttgctgaacacgggaatgcagtgcgtggcagagtcagcctggagcagtggaatggggagggctagggccacggaatcccaggcctagatggagcgtggtctgagtttggggcatagaaagctggggcttcaaaggggactctgtgggaaggtccaaggatgttcaactgctgcttt

SEQ ID NO: 6960 - DNA, 478 bp, Mesocricetus auratus; identical to SEQ ID NO: 3318
  misc_feature (220)..(266): n is a, c, g, or t

SEQ ID NO: 6961 - DNA, 787 bp, Cricetulus longicaudatus; identical to SEQ ID NO: 3319
  misc_feature (76)..(90): n is a, c, g, or t

SEQ ID NO: 6962 - DNA, 1400 bp, Mesocricetus auratus
acagaagatggatttctggctgtatgttcagaagctaaagggctcgtttccttgaagcactccacaactcccttcttaaaagtggagcccttccttcctggacactatgaagttttggatttaaaaccaaacggcaaagttgcatctgtggaaatggtgaagtaccatcattgtcgggatgaacccctgcatgccctctacgacagcgtggagaaactcttcccaggcttcgagttagaaacggtgaagagcaaccttcgtatcctgtttgacaatgctgtcaggaaacgcttgatgacggacaggaggatcgtctgccttttatcagggggcctggactcgagcttggttgcctcctccttgctgaagcaactcaaggaggctcaagtacagtatccactccagacatttgcgattggcatggaagacagccccgatctactggctgctagaaaggtggcaaattatattggaagcgagcatcatgaagtcctttttaattctgaagaaggcattcaggccctggatgaagtcatattttccttggaaacttatgacattacgacagttcgagcatctgtaggtatgtatctaatttccaagtatattcggaagaacacagacagcgtggtgatcttctcaggagaagggtcagatgaacttacacagggctacatatatttccacaaggccccttctcccgagaaggcagaggaggagagtgagaggctgctgaaggaactctacctgtttgatgttctccgcgccgaccgcactactgctgcccacggtcttgagctgagagtcccgtttctggatcatcggttttcctcctattatttgtccctgccaccagaaatgagagttccaaaaaatgggatagaaaaacatctcctgcgagagacgtttgaggactccaacctgctccccaaagagatcctctggagaccaaaagaagccttcagtgatgggatcacctcagttaagaactcctggttcaagattctacaggattatgttgaacaccaggttgacgacgcaatgatggcaacggcagcccagaagtttcccttcaatactcccaaaactaaagaaggctatttctaccgccagatctttgaacaccattacccaggccgggctgattggctgacccattattggatgcccaagtggatcaacgccaccgacccttctgcccgtactctcacccattataagtcagctgccaaagcttagatgctctctaaactctagtgtaaaagttaagtgtttcttctcactctgaaggagtagacatcgagacaaacacagaagtaatgcaaatcaaccatcaaccactcaggctaacataggcatggaaagaaataaaaatattacatctaaaatgaaaaaaaaaa

SEQ ID NO: 6963 - DNA, 600 bp, Cricetulus longicaudatus
ccgaggcggcggcgaagctagttgggtttacctcaccgctttctcgtgcctcggcgcctcctctgcgggcttcctcctcacaccgctcttcgctcccgccagccgaccgattccgtcatggcgacccgcagccccagcgtcgtggtgagccccgggactcttcagcagagcggacagccaggcctaggcggctggctgctcagtggcgccgctcggggcccgttggcgggccttgggtgttggggcccgcggaagtccggggcgggggcggtcaccgcttcccggaatccggctgcgcgtccccagagggcggcgggcagcaggatggaatggcggggttcagggctgggtctcccctgggagccccgagacggttgactgcttgtgaggcaggcaggtggaaatggcgttgccttgacatgtgcggccaccgggagcccggctgggagaggcggagggcgacttggagaaagatacctcacggagaggggagaggggagagggcgggggagctttctcggggagacccttgctcttgaagttcggggcttggcggccagggagagcttcggggggcgcctctggaaggagctccagtac

SEQ ID NO: 6964 - DNA, 275 bp, Cricetulus longicaudatus; identical to SEQ ID NO: 3322
  misc_feature (172)..(192): n is a, c, g, or t

SEQ ID NO: 6965 - DNA, 221 bp, Cricetulus longicaudatus; identical to SEQ ID NO: 3323

SEQ ID NO: 6966 - DNA, 285 bp, Cricetulus longicaudatus; identical to SEQ ID NO: 3324

SEQ ID NO: 6967 - DNA, 193 bp, Cricetulus longicaudatus; identical to SEQ ID NO: 3325

SEQ ID NO: 6968 - DNA, 459 bp, Cricetulus longicaudatus; identical to SEQ ID NO: 3326

SEQ ID NO: 6969 - DNA, 1375 bp, Cricetulus griseus
  misc_feature (572)..(726): n is a, c, g, or t
  misc_feature (1017)..(1061): n is a, c, g, or t
gttctttctgtttgtcgtaatgtggtgcccattcttcatcaccaacatcatggccgtcatctgcaaagagtcctgcaacgaacatgtcatcggagccctgctcaatgtgtttgtctggattggttacctctcctcggctgtcaatccactggtctatacactgttcaataagacttacaggtctgccttctcacggtacattcagtgtcagtacaaggaaaacagaaagccactgcagttaattttagtgaacactataccggcattggcctacaagtctagtcagctccaggcgggacaaaataaggactctaaggaagacgctgagccgacagataatgactgctctatggttacactaggaaaacaacaatcagaagagacttgtacagacaatatcaacaccgtgaatgaaaaggttagctgtgtgtgacggactggttgctgtgacgctggcacttgaacaagtttttagccttgtgtgtgggggtgggaataaggaggctgggacaaattagactactccagtgactcaacagaatctatatgcctcattgtattctgtgtatgannnnnnnnnnnnnnnnnnnnnnnnnnnnnnnnnnnnnnnnnnnnnnnnnnnnnnnnnnnnnnnnnnnnnnnnnnnnnnnnnnnnnnnnnnnnnnnnnnnnnnnnnnnnnnnnnnnnnnnnnnnnnnnnnnnnnnnnnnnnnnnnnnnnnnnnnnngcataaaatcaatctaattaatttctattattcaaattgaaaccttgctgccatgttgttgatgggtggcgcaggagtgagttggtgaactattattgtatataaaaatagctagaaatactaaaataatgaatagcctcttttaaaaaagtgtttaaaattcaccatgacacatattttgaaaataaaaaaatagtattatgaaacttgtattgctaatataaattaattgaaatacttgacaatattttttcattcttgccttttcatagatgccattttgaatgttcnnnnnnnnnnnnnnnnnnnnnnnnnnnnnnnnnnnnnnnnnnnnntgggaagggtttaaatgttactcaataacgtgctgcttctcttctacttcttggcttaacctgaatttgcaatgtgatcttgtttcgtatattttcctctctgtaaactatcaaaggataattttgcttttcgaaatacagttctagaacgcgcttcaaagaaacagcaccctggaggtatttggtcacgcactgtgggaccactgcattgtgcatgcgccctttgagctgtgaccagtacattgatttgactgccacagctaaacaataaactcaggtttctcgctgttagcagtagcttcttaggctgtttc

SEQ ID NO: 6970 - DNA, 600 bp, Cricetus cricetus
ctagttctcatggggctggccgagattgcgtccgtgcgctgtgaggtgagcggggcgcgggagggatgtgcggccacgtgtcgcgaggccccggctcgtgccgcccgcaagggacacgtgccccggggccgtgaccttgcgagcccgtgccgcccggaaggaaggcagcggttcctgacccgtggctgcaaacccttgcgacgcccacgggagctctcttggcgtcagcccggctctgcgctccaccggcgaggatggaggcaacccgcggcaggtgcaccccagcgcggccgccggagcagtcctccctgcagctccctgccgctttctttggtttcgctacgtgtacagagcagagccgacgtagaagttgctagacctaaatttagtccgggagtcactgctgatggatgcccaccggctgtgacttggaattagcactcctgggatgacttagtggtttaggagaagcccggctgtccggcgtgcatgtttagaagcccggctcggaatcctcagtaactgtaaaagtgagggggccagagcctgtcaaggatgtctgggagaggacaaagaatgcagtggctcattttattcaaa

SEQ ID NO: 6971 - DNA, 1161 bp, Mesocricetus auratus; identical to SEQ ID NO: 3329
  misc_feature (319)..(336): n is a, c, g, or t

SEQ ID NO: 6972 - DNA, 682 bp, Mesocricetus auratus
  misc_feature (615)..(634): n is a, c, g, or t
tgcatgcagaattgggctgtggttcccgaagcttctggctgtcaaaggcatttctgatattgctgacactgatcactgaaagggaactcgagaagcgatgcacatctcaaagctgccagctgctctcctcatcttctctgtggcactaaaccacttgaaggctacacctgtcagaagtggcaccaaccatcagatggacaaacggaagtgcaacacggccacgtgtgccacacagcgcctggccaactttttggtccattcgaacaacaaccttggtcccgtcctctcaccaaccaacgtgggatcgaacacgtacggcaagaggagtgctgcggagattccagacggggattctttggatctcttcctcctttagagtcggcatacttcttcatctcttgttattttgtgtgtaaatactctggcactttcacgaattatttaacagtgcctttttcatttctacttgtgagtgcactgcaacgtgttccatgctttctggctctgtgtgtgtaaaatcctcatcctaagaatggtttttaaactgagggctgaatcaagatcaggctgaagaccatgtctcttgacacaacatgttcttgaaatactgaaaannnnnnnnnnnnnnnnnnnncttataactttgtgattcaagtctaacaataaaggagactcctggagc

SEQ ID NO: 6973 - DNA, 336 bp, Mesocricetus sp.; identical to SEQ ID NO: 3331

SEQ ID NO: 6974 - DNA, 600 bp, Mesocricetus sp.
  misc_feature (90)..(90): n is a, c, g, or t
  misc_feature (97)..(98): n is a, c, g, or t
  misc_feature (114)..(115): n is a, c, g, or t
actgagagcatccacattctctctagatggtggtccatgaaagtgaggagtaatcgagccctcccgatgcagggtggaagatatgcagantgtgtannttccatggctccttgnncatcatacttaagttccatgtgactctttgccacatgcaataaaatttgccttgtttcaagttgtttcgtcttgtgcctttcctcttctccgcatgagatgatcctcttttgatgattttttttctccgatactgaatatcataagcagatggttaggcagaattaattggtaattgtgtgatgtgtaagtgggcttctggttatatgagattaagcattgcttcatgggtcaggagagagagcttgcaactctactttatatcagtagagacaaaggtgttcagacactgttcaatgctggatacactctcacatttctaggaatatattcttgatttagttaataatggctggttcacatacatgaatatagatgaatgtcatagtgttggtcttcagatctcagagcacggtgtagctcatggtgacatactcccaaatctcagctctggtccacctgcactgtaaagcacattttataagc

SEQ ID NO: 6975 - DNA, 579 bp, Mesocricetus sp.
gcttgtccttgtggtgtgactcaggttaggatcgggccaagtccctgggcttcaggaaaccttcaggtaaacccaggtcacccagcactcctttaccatgaggactagcttaggaccgagagaaaggtctccttctcgggttgcacgcagaggctcccatctcttcccttgtggtttgttgtttttaaagatagaatctcatatgtagccccggatggcctagaactcactagatagaccaggtgactcaaactcagagacactgactctgccttctgttgttcttagcatggaagaagaagccgtctcaaactgcctcttccattctgttcagtgttcttgttgaggaatgtcttattgtttattatttttccatgctattatttttcaatgctctgtctgccgtatgtgcttctcagaagaggaaaatggagtgtcaagagtggcattagaagccccttcaccaaatgaagggattgagacacttggattaaatacactctaagtccacagcgtacagtgacaagtgaacaactatgagccgattatatttccagggtgacaccttgtgtggagctc

SEQ ID NO: 6976 - DNA, 418 bp, Mesocricetus auratus; identical to SEQ ID NO: 3334
  misc_feature (323)..(324): n is a, c, g, or t

SEQ ID NO: 6977 - DNA, 748 bp, Cricetulus griseus; identical to SEQ ID NO: 3335

SEQ ID NO: 6978 - DNA, 80 bp, Cricetulus longicaudatus; identical to SEQ ID NO: 3336

SEQ ID NO: 6979 - DNA, 79 bp, Cricetulus longicaudatus; identical to SEQ ID NO: 3337

SEQ ID NO: 6980 - DNA, 600 bp, Mesocricetus auratus
  misc_feature (85)..(136): n is a, c, g, or t
tatttcttctcacaagcccttccttcagtcaagcctctggatcctactcctgttcctttgccctgccctgagtcctgccatcccnnnnnnnnnnnnnnnnnnnnnnnnnnnnnnnnnnnnnnnnnnnnnnnnnnnnagatcagatctgcctgtgtgctggctctggtccccagagtgagcaacggggccctgtttgatctccagtaaagtctgaatgacatttttcctgtgtcttgttttgctgctgtgactctccgtgttggctttttgggtggtctctgttttgttgcctgaaggaggggctggagaaagaattttagggactctggggttacttaaagtccttgatgtccctgtgtcctcaatcaggtattcccctggaagagatctccttcatttcccaactattcttcagagtgcagtgcctcagttgtccgtgtgtagtttgactcatgtttcagagacatcctgtgccgaagggaagtgttgagcaggctggccttggctggtccatcttctcatcagcttttctggctgcacacaccacccttgtttgtgttgccaacatctctcttcataaacattccccactgtctgcag

SEQ ID NO: 6981 - DNA, 600 bp, Cricetulus griseus
  misc_feature (76)..(131): n is a, c, g, or t
accacccccagatggaaatcccaaatcccaggtcctgacatgtggctgcttcgaagacagagagatgggggaaggnnnnnnnnnnnnnnnnnnnnnnnnnnnnnnnnnnnnnnnnnnnnnnnnnnnnnnnnatgtttgtgtatgtatgtgagtgtgtgcaaatactttgtatataaacagcacagctagtagttgtgttacaaataatatcaattaatagaattaattaaccatccttattgtctctgattgttagtgactgcttgggaattggctggacccaggcactcagacagggtgtttcccccagctccagtagacttttaccaatgacccagcctttaggcctgtgcagggctggagcaggatcatagggatgacagtgacagcaatgtggctatagccattaggactgagaaagcattgtgaccaggggtctcagcaaggcctgggtcctgccttcagtgtggcatccttggtgcatgtcttccaatcctacttggcctgagacccagccctccttcttggcttctggaaacatttgttcttccacaccagcaaccaggtagcaatggttccaggccagcatggagttctaga

SEQ ID NO: 6982 - DNA, 1269 bp, Cricetus cricetus; identical to SEQ ID NO: 3340

SEQ ID NO: 6983 - DNA, 392 bp, Cricetulus longicaudatus; identical to SEQ ID NO: 3341
  misc_feature (56)..(56): n is a, c, g, or t

SEQ ID NO: 6984 - DNA, 437 bp, Cricetus cricetus; identical to SEQ ID NO: 3342

SEQ ID NO: 6985 - DNA, 1400 bp, Cricetulus longicaudatus
aaggttaaatcatgtaggagattgggggacccagtttggcatgctcatcgctcatctgcaagatcaatttccagattatctcacagtttcacctcctattggggatcttcaggccttttataaggaatctaaaaagaggtttgataccgaggaggaatttaagaagcgagcctatcagtgtgttgtttcactgcagagtaaagacccagatttcataaaggcctggaacctcatctgtgacgtctcccgtgcagagtttaataaaatctacgatgcattggacatcactttaatagaaagaggcgaatccttctatcaagataggatgaaggatatcgttaaagaatttgaagataaaggatatgtgcaagtggatgatggtagaaaaattgtcttcgtgcccgggtgttccataccattaaccatagtgaaatcagatgggggctttacttatgatacttctgacctagctgctatcaaacagagactatttgaggaaaaagcaaataagattatctatgtggtggacaatggacaagctgtacatttccagacaatttttgctgctgctcaaatgattggttggtatgaccctaaagtaactcaagtgacccatgttggatttggtgtggtgctaggggaagacaagaagaagtttaaaacccgttcaggtgaaactgtacgccttgtagacctgctgggagaaggactaaaacggtctatggacaagttaaaggagaaggagagagacaaggtcttaactgaagaggaattgacagctgctcagacatccattgcatacggctgcatcaaatatgctgacctatcccataaccggttgaatgactacatcttctcctttgacaagatgcttgatgacagaggaaacacagctgcctacttgctgtacgccttcactagaatcaggtctattgcacgtctggccaatgttgatgaagagatgcttcagaaagctgctcgggaaaccaagattgttttggaccatgagaaggaatggaaactaggccggtgcattttacgattccctgagattttacaaaagatgttagatgacttatttctccacactctctgcgattatatatatgagctggcaactactttcacagagttttacgatagctgctactgtgtggagaaagatcgacagacagggaaagtattgaaggtgaacatgtggcgaatgctcttgtgtgaagcagtagctgctgtcatggccaaggggtttgatatactgggaataaaacccgtccaaaggatgtaatccttagggttggagactgtttttaccaaagtggctattagtactgtttactttttaaacaatcaatgtggatacaaaagtagtaaaggaattttcacaactaaaaaaaaaaaaa

SEQ ID NO: 6986 - DNA, 600 bp, Mesocricetus auratus
  misc_feature (350)..(368): n is a, c, g, or t
cggcccctctttctgagccccgcggtgcgcgctacggagctcggccagcctgctccgtcctgactcaccgctgttcgctcctgctgaggaacaagtcggtcaggaagccgcgcctcagccatggtgaggtggggggcgtcgccacgcggcctggggcgtcggcggggctcgacttgctggggcgccgggagcgcagagcccgggagagggctcccgccgcggcgagggcccgggagagggtcctcatggcggttgtgtaggagtgggcctccacttacgggtcgctgtttgtttttcccgcctgggtgataacaggcatttaaagataccggaaagacgcccgtggagcnnnnnnnnnnnnnnnnnnnaattcgaatcacgctcaccagccgcaacgtgaagtcgctggagaagggtcagtacgatgctcggggtggcttggtgatcgggaccactcctcctcgggctcccggactgccacgccggctggcctggttctccatagactgggaacaggtatgtctgatgcataggctgggctctggagggtttggctcggtgtataaagccacttaccacggtgttcctgtggccatcaag

SEQ ID NO: 6987 - DNA, 600 bp, Mesocricetus auratus
  misc_feature (503)..(530): n is a, c, g, or t
taatgcaattttcccaaatggagcagcatattgtatgggacgtatgaattctgactgttggtacttgtatactttggatttcccagagagtcgagtaatcaatcagccagatcaaaccctggaaattctgatgagtgagcttgacccagcagttatggaccagttctacatgaaagatggtgttactgcaaaggatgtcactcgtgagagtggaattcgtgacctgataccaggttctgtcattgatgccacactgttcaatccctgtggctactcaatgaatggaatgaaatcagatggaacatattggactattcacatcactccagaaccagaattctcttatgttagctttgaaacaaacctaagtcagacctcgtatgatgaccttatcaggaaggttgtggaagtcttcaagccaggaaaatttgtgaccaccttgtttgttaatcagagttctaaatgtcgcacagtgctttcttcaccccagaagattgaaggtnnnnnnnnnnnnnnnnnnnnnnnnnnnntgttcaatgattacaattttgtttttaccagttttgctaaaaagcagcaacaacagcaaagttgattaag

SEQ ID NO: 6988 - DNA, 114 bp, Mesocricetus auratus
tgatgaccagcactgctgtgtacccctcatccccatcctatacaagaccactgtgctcaaatttgaaaccagaatttctgtttaataaagtctattcttttcagtaaaaaaaaa

SEQ ID NO: 6989 - DNA, 543 bp, Cricetulus barabensis
  misc_feature (246)..(262): n is a, c, g, or t
gtgctagggtaccagggcctcctgagaaggaacaggtgcaaagcagagcaattagcccagaggcatcagtggacagacaggctggatttgatagggagccaccaggattacatcacctgctggcgagcaggccccataagtctccccgtgcatgccgggcagcaaggaaacttggttcttcttcaaggagccagaggacacggtaattaaaatatttttttaaaaaaaatcaaaacatttcgaagnnnnnnnnnnnnnnnnngcctctcacatggtgttctggcactccacgttcgctctagaagggaagaagagggggtgtcacaggtgctgagagttggacaagcccagagtgaggcaggtgtgcactgtgtgagctggcagctgctaatgtctttggaaactgctaatttacccttctgcaccagccacaaaaggggaccactcaattatccccccaagaggctgatgtttagctcgagctcaatttctgtctctgtctctgtctctctctgtctctgtgactccctctgacccccttcc

SEQ ID NO: 6990 - DNA, 600 bp, Cricetus cricetus
gtgttccacagtcctttggggaagatcgagctgtgtggctgtgagagaggcctgcatgggatacggttcctcagcggaaagaccccaagctctgaccccaaagaggccccagccagtcctgagttgctcggtgggccagaggatctgccagagtccctggtgcagtgcacaacctggttggaagcctatttccaagaacctgcagccacggaagggctccccttgcctgctctccatcaccctgtgttccagcaagattcattcaccagacaggtgttatggaagctgctgaaggttgtgaaattcggagaaatggtttcttaccagcaattagcagccctggcaggcaaccccaaagcagctagagcagtaggaggagcaatgagaaacaatcctgtccccatcctcatcccctgccacagggtgatctgcagtaacggcagcattggtaattactctggaggagggcaggctgtgaaggagtggcttctggcccatgagggcatcccaactaggcagccagcctgcaaggacttgggtcttactgggacccggctcaagccatccggtggctccaccagctccaagctatctggctga

SEQ ID NO: 6991 - DNA, 732 bp, Cricetus cricetus; identical to SEQ ID NO: 3349

SEQ ID NO: 6992 - DNA, 475 bp, Cricetulus griseus
gcagtgaaattttttaagtcctggttgatgggccgtgctactaggagcatggacaacagtggtgcctagggtgatttgaattgtggagacttggctcaaagaggttaatgagggaaagacttcttagtatgttgactagaggtttttcttgtgatatttgggggagagaatgtagttgtgttctgccatattgagattcttatcatgtattgagaaataaaactggggaataaatattaaggaataaacataagaaatcccagcatgactgagacaacattcgccctctctacttcctcaatctaagagtgcccacaaccccttgaccccatctcttcctctcatgtgtgctttcctctttcttttcttagtttctcagagaactcaatagtctattctggtcagctgaatgtggactttaccctctgaatccaggtaagctccaatgatgggttaaccctaaccctaaccctaa

SEQ ID NO: 6993 - DNA, 430 bp, Cricetulus griseus
gctctcccacaggtgcttgttgtcatgggtggatcttctgctgtggtcttagtgtttccagtctccacccagcagcaacacagcctttgagggcaatgaccactcttctgccattcaaggacacctgaagaatgatcatcaaagacactcagagcaaagttttgttcctcatcagccacctcaggcactttgttagcttaccctgaccacaccagtgcagactaaaaggggcgtgtgtatctgcagattaaaagattcagggatacactttaacatgttaaacactaaattaaaaaaatacctctctttgtctgtagctcaggttgatcaggacttctgccaccatgcccaggaaaactttattttattagcacttatttttagtattacttttaaaatgcttcagtaatttccctaaccctaaccctaa

SEQ ID NO: 6994 - DNA, 536 bp, Cricetulus griseus
  misc_feature (399)..(417): n is a, c, g, or t
gaagtcaggctgtatttctgaaaatttttaatctttaaacttctttcctttggaaaaaaaaagttttgggcaacaattgcattgagcactaacctcttgagttgtgcacagagcaggtctttgtcaccgagtatgtatcgttataaaggattacctggggctgtgttgagaggcgagcagcttcttgagaggctgtcctgataattaagccaaaagtcaaggcctgaaggagggttaaggctctgccgcaagtggaaagggagaggagagactggaactttgacaaatttaattgtataatccaatagtattaaaggaaaaaaggaagcacctgaggcaacttgaggtttaggggtccaccagatgcctgtattgaacatggaggtgcttttctgagannnnnnnnnnnnnnnnnnncattgttttacttagtcctcaagtgaccctgagaggaaatgccattgtcatcccaggagcttgtatgcgactaatgaatctgagatcagacaccatccctaccctaaccctaaccctaa

SEQ ID NO: 6995 - DNA, 343 bp, Cricetulus griseus
ggatgacagtctttccttcataagtccaatccccgtttggttcctttgcggctcccaattcctctagggtttggatgtctctttgttcatagtcccatgaggggaagggatggtcgttggtgggctctagagccaggaggttagtggtgtctgtggtcaggggccgcctctcgggcagccaagtctgcccttcgattgccccttgcttcgaaagaatcccctttttggtgccatgtagactgctcccaggttaacagtaataaaaaccccttctggatagaactttacagatgcaggagctggcccattgagttctctgaatgggccctaaccctaaccctaa

SEQ ID NO: 6996 - DNA, 592 bp, Cricetulus griseus
acagtcaaagtttccataaacagaacacatgcacccaggttacagagtatatgttttataaactaaaaatctccaaataaatgtagaaattataaggtattcagtaaagagaattggaaattgcaagtaattttgaaagatacaataaattgtttttcagtgataagaattttttattttttaaggagacagcatgaatactgttccccactaccaagaattggtacagtctaatttcctatatttaggaaaataactggggtcagcacatgcagagatcaatggaataagcatcaccttgaaggttacagaatctccccttccagataagaattaaattttaataaccttctcaatatactatcacaaattatcagttttgaatatgtgactccagcctcttcctctataagtataagcattctagcaattaaaactacatggatatttaccatcacattatatttatgcatgacattttctttttttaattattttttccaacttttttatttgaattagaaacaggattgttttacatgacaatcccaattcccttctcccaccagtcctcccctaaccctaaccctaa

SEQ ID NO: 6997 - DNA, 600 bp, Cricetulus griseus
  misc_feature (405)..(425): n is a, c, g, or t
ttgccagcactctccaaggacaaggaggaggagatccgcaaaatcttgaggagcaaccttcagaaaacccggcagcggctgcggtcctataacagacacacgctggtggccgacccctacgaggaagcctggaaccagatgctgctccggaggcagaaggcccggcagctggagcaaaagatgagcaactacctgacggtgccagcccacaagctagactcacccaccatgtctcgggcccgcataggctcagatccactggcctatgagcccaaggcagatttgcctgtcatcaccatcgacccagcctccccacagtcacctgagtctgtggacctggtgaacgaggaattgaaggccaaggtcctaggggtaaaccgggatccaacaaggctgactcggggnnnnnnnnnnnnnnnnnnnnntgaggatggtgtcattatgatgcggaggaaggagccctcatccccaggcaccgatgtcttcacccctgcaccaatgtacagccccagctcccagagaatacagcgctgcctcagtgacccaggcccccacccagagcctggggagggagagcctttcatcccaaagggcgagtag

SEQ ID NO: 6998 - DNA, 207 bp, Cricetulus longicaudatus; identical to SEQ ID NO: 3356

SEQ ID NO: 6999 - DNA, 600 bp, Cricetulus longicaudatus
  misc_feature (215)..(231): n is a, c, g, or t
aaactccttgaaaaataaacaaacaaaacaaaacaatacatataatagttaaattgtatcagttatgcccaaaatgtctctcaaaataaataaataaataatttattgttttgtttgagacaggtctctcttcataaccctggctgttctggaactcactgtgaagaccaggctggcttgaactcacacagattgacctgcttttgcctctgccnnnnnnnnnnnnnnnnnaaaagtgtacaccaccactcccagcttctttatattttccagagacggtctcactatgtatccttcgctgtcctggaactcagtatccaggctggcctcaaactcacaagacatctgcctagctctgccatccaagtgttaatattaaaggcgttcaacaccatacttggataatagatttttttaatgagacatttgacattttcctttattattgaccaccaaaatcaccttgattatcatcaccatcactgccattaccaccctcatcatcagcaccaccaccaccaccatcaccattgccattgccattatcatcctggctgtgtttacagctccatctctattggttgaatagccttagataga

SEQ ID NO: 7000 - DNA, 571 bp, Cricetulus longicaudatus; identical to SEQ ID NO: 3358

SEQ ID NO: 7001 - DNA, 591 bp, Cricetulus longicaudatus
  misc_feature (419)..(480): n is a, c, g, or t
gcagagatgaggaatggaacccaaggcattacacacacaagccaatggcaccctaccatctgaactgtgttgcctaactgtgatagttaattttcttcctcagcttgacggggtttcacttcaccatgcctctgggcagtggcatgtccatgaaggatttcctctctcttcctttctttcttatttattttgagtcagggtttctctgtatatgagtactggctgtcctggaacttgctctgtaggccaaacacagagatctgcctgcttcacactctggccaggccctcccccaaactgggaagcaaaacaactccttacattttatcagattttttgtcaaggcctcttccaatccatggaaccttaattaaaacatggtcacaaaaaatcaaagtagcctggcagtggtgcactgnnnnnnnnnnnnnnnnnnnnnnnnnnnnnnnnnnnnnnnnnnnnnnnnnnnnnnnnnnnnnnggcaagttccaggacatcagggctattacacagagaaactgtctaaaaaaaaaaaaagccaagccaaaccaaaccaaaccaacaaacaaaaaagccactccacagaagctt

SEQ ID NO: 7002 - DNA, 600 bp, Cricetulus longicaudatus
cattcctgccaggttggaaaacacagccttctgctcagtgacagtcttaatgtttgattgggaaggtacaacctctgcctctatccctcaacatatgggtgacctatttgcttgtaaaaatatgaagccttatcattaattaataaaaaagggggagatgtagggagccgtccctgcattctcctttacaagatgtgcctgcatccggcaggcaccgaatgtaaacaagattattgtgcaggcgctgggtaactttccattccttgatctctgcctattccgtggcgtcatatggtccaatgagctgcagccaatcatggggtgacacgtccgaggcggccgttgccagcctttattaggggacgggattcttggctcggggtctccgcttttgtaagcttatgctctcctctcaagacgcattaaagctttactgcagaaggatccgaatgtcctatgtggttcttgccggcaagacgatcgcgcgggacacatacttgcgccccagacctagctctgctttagcttcttcgttcaaagtaatcaccctgcacaattctcatctgcaggtttccctcacacaatgtgttcctcctccac

SEQ ID NO: 7003 - DNA, 424 bp, Cricetulus longicaudatus; identical to SEQ ID NO: 3361

SEQ ID NO: 7004 - DNA, 424 bp, Cricetulus longicaudatus
cgtagttgggagccaggctcggccctgaaggccagaatccaggagaatgctgttgagtcttctacatcagatgccaaggtttccacagagcaaccatggtgagtcctagtgagccacaaggtccagggaaggacaggctgttgggagcccatcccagaagagaagccaaggtgtcaggaacatgaggtagctggtcacaaggcatgcacagtcagaaagcacagactgatggatgctggtgctaggctcactttcttctcttttatttactctagctcttcacatcgctggaaggtattgccacatttggggcatatcttcccccccttaattaaatctctctagaaacagataggcctagaggtttgtttccatggtttttctaaatcccctcaagttgacaattgggactcaccatcacttt

SEQ ID NO: 7005 - DNA, 433 bp, Cricetulus longicaudatus; identical to SEQ ID NO: 3363

SEQ ID NO: 7006 - DNA, 433 bp, Cricetulus longicaudatus
tcatttggaaagagaataaaggacaaattctgctgcccctgtgcgacaggcttcaccaactaattaaatccacggtgctttctggccttatggagacttcgtgcaatcgatgtctggaatcttgtcacatccagaagatctgttgctgtccaggtttccatggcagctaaattttttcctttttgtgaaattatcctcagcccttggcgctagattgccacataagtggggtattatcagcttaatgaagggaccctttctgcaggctgtcttcctgtgctgtcaggaagtggcttgccgcacgctgcgatgtgttcagtcttattctcagtatccagctggagatgtctcacaaagctgggtggttgtgtgccagagaacatcttggggcctctgaagaatgagcaccccctctttgctttaatctggtacc

SEQ ID NO: 7007 - DNA, 1346 bp, Cricetulus longicaudatus
  misc_feature (1025)..(1055): n is a, c, g, or t
tgacaaacaaacttagattcattgctgaaaggagacgttctcaaaatggatttgactccaaggccttgcacatcttggcgtttcttcaggagttgaataaagaaagccagcaagcggccaaagtctctgaaaggggacaggactctgagaggcctgttttttcaccgtctttgcatgaggggggaaatgaacagtagtaaactggtgcccacaaggctactgctggaaggaaagtagaaacccttaccaagtagccattcagaatacttaacaactacatggaataagcatgtcctaacaggctgactgtagtatttatcagggttgctgggaaccctgtgatcagatgttggcacctaaatctctggatcatgtaggggtctcagaaagaggccagttggaggcacagacacagaggcctggcaaacagtctagatctctttctatttcttagagatagtttccatggtagcaaattttcaaaccccctctgtggatttgtcttgggtttgtttctgtatttatgtaaagcagtcaaattcctcctatgggtgagtttccatccttgagttattgctgatatgcacagccttgttctacataataacagtgtccatcaaaaaactgagcagtggctcagacaataatcccagcacttggcaggaggtgagacaggaggattacagtgagttggaggtcagcctgagcatgacctggaaaggggtgaagggtgttgagaattagacatgtaaatattaaatgattatgtacgttgcttgttagtttggatatgtatatgcctttataaccactatcatcatatgtttataaaacccagaaggtagtgattttgttttactgcataattttgaaatttacaaaatagtgctcaatattaattgagctcaaaatagaaactcaatagtgagttccaggtctaaaaacaaacaaaccataacaaaagctgagggaccaaatcaatcctccctccaattgcccagccagtcctcaatctaccgtgtccnnnnnnnnnnnnnnnnnnnnnnnnnnnnnnncagatggcaatataactggaaaaactgagaccagaggaagttagaaggcaggccatatgtgtgcaaagcaggaagtcaatgccaaacttccaagatgctctcggagggactgcttcctgactctgctctatttgtgagtatgatgctgcatgccccttttctgcctcaatcccagaaaacacaaagccaacaaatcatttctgaaacctctgaaacaaccaaccagaataaagctccctgttcttattatttctctctggtatttgtcacagcaagtgaaaactgttgggg

SEQ ID NO: 7008 - DNA, 1050 bp, Mesocricetus auratus; identical to SEQ ID NO: 3366

SEQ ID NO: 7009 - DNA, 978 bp, Cricetulus longicaudatus; identical to SEQ ID NO: 3367
  misc_feature (359)..(382): n is a, c, g, or t

SEQ ID NO: 7010 - DNA, 536 bp, Cricetulus griseus; identical to SEQ ID NO: 3368

SEQ ID NO: 7011 - DNA, 580 bp, Cricetulus griseus
ggggagtgggcggggcctccacccagcgggtagataaaaggccagggtgtagcacgctgaggcccagacaagcaaaggacttgcttgctctttcctcctggggcggaggtctgttttggtagtggcaagtgaaagaagtagctcctggcaagtcttccttcgttgcttggcaggatggaaggtcgcagccgtgtgggaaaaatcagggtggcccgggaatcccggcgcccaaagacccttttgaaaggcatgcagaaggaggcccttctaagtcgtttcgccaagagcccttccccaagcttccgggccagggagcaactagccagggaaatcgggctgcctgagtcccgagtgcgggtgtggtttcagaaccgccgaagtcgttcggggatggtgaggcgaggcccagaatcctcagcgagccgaagcgtcctggagtccccgaagccgcctgaaatgtctgatgccagggcacaaggtagaaggagcagcccgtcgggacgtaggaggcctcgcactcgactcagctcgacacagttggccatcctgctccaggcttttgagaggacgtacccgggca

SEQ ID NO: 7012 - DNA, 600 bp, Cricetus cricetus
tcctgaagaaaacattgaagatccaggatgtcggccttatgcctatgggtggcatgatgcctggtgcagtccctgctgcagcagcagcagcccctgaggtggctgagggagaagacatccttaaacagaaagagcggacacacttcactgttcgcctaacagaagcaaaacctgtggacaaagtgaaactgatcaaagagatcaagaactatgtccagggcataaaccttgtgcaggccaagaagctagtggagtccctgccccaggaaatcaaagcaaacgtcgccaaagccgaggcggaaaagatcaaagcagccttggaagcagtgggtggcactgtagttctggagtgacactctctttctgaggactttcggactggggtccctgggacctgggcaaaggcctgctcacccctgcttcactcccaggtggcttgttgggagcaacagctgctgacacttggtgaccgaattctcctgggagagggacaggatggacctactgtgatggggaggggcagtttacagcctgtgcagactctcaagagattgccttgagatgctataaagtgaacagccctggaggcgactaagagag

SEQ ID NO: 7013 - DNA, 927 bp, Mesocricetus auratus
aaatccaacatgaaaatcctcgtggccgttgcggtcttttttctcgtttccactcaactgtctgcagaggaaatcggtgccaacgatgatctaaactattggtccgactggtctgacagtgaccagatcaaggaggcgctgccagagccctttgagcatattctgcagagaatcgcccggagacccaagcctcagcagttctttggattaatgggcaaacgggatgctgattcctcaattgaaaaacaagtggccctgttaaaggctctttatggacatggccagatctctcacaaaaggcataaaacagattcctttgttggactaatgggaaaaagagctttaaattctgtcgctttcgaaagaagtgcaatgcagaactatgaaagaagacgtaaataaactccatagcacactattattcagcttcatttgtgtcaatgagtggtgaaaggtaaaataaaatgcactatgaggaatgattatttatttaataacaaatgttgttatgagtggcggaactcaaaaaagtgtttattttttcatattgtgccaataagaggttgtaattctaaatatggggacctcctcaggaagtaggagttaggtagtaattcccagcaaaagcacggtgtcgatggtattgcacaagcttgccaaggatgcagtcgccaaagaaagacatggccactcagagccagttcagacagctgctgccatgagcgcaggaactcctgtgtgctcttgtgcttttaggctgacagtgtagaaactttggcatctgactctattggtatcctagcagcatgtttcatgttttgtgactatatagagatgtttttaaaagtttcaatgtgactccctggtcttcattcattgtatgatgtgttgtgatagctaccattgtaaataaaagaatctatcttc

SEQ ID NO: 7014 - DNA, 882 bp, Mesocricetus auratus
aaatccaacatgaaaatcctcgtggccgttgcggtcttttttctcgtttccactcaactgtctgcagaggaaatcggtgccaacgatgatctaaactattggtccgactggtctgacagtgaccagatcaaggaggcgctgccagagccctttgagcatattctgcagagaatcgcccggagacccaagcctcagcagttctttggattaatgggcaaacgggatgctggacatggccagatctctcacaaaaggcataaaacagattcctttgttggactaatgggaaaaagagctttaaattctgtcgctttcgaaagaagtgcaatgcagaactatgaaagaagacgtaaataaactccatagcacactattattcagcttcatttgtgtcaatgagtggtgaaaggtaaaataaaatgcactatgaggaatgattatttatttaataacaaatgttgttatgagtggcggaactcaaaaaagtgtttattttttcatattgtgccaataagaggttgtaattctaaatatggggacctcctcaggaagtaggagttaggtagtaattcccagcaaaagcacggtgtcgatggtattgcacaagcttgccaaggatgcagtcgccaaagaaagacatggccactcagagccagttcagacagctgctgccatgagcgcaggaactcctgtgtgctcttgtgcttttaggctgacagtgtagaaactttggcatctgactctattggtatcctagcagcatgtttcatgttttgtgactatatagagatgtttttaaaagtttcaatgtgactccctggtcttcattcattgtatgatgtgttgtgatagctaccattgtaaataaaagaatctatcttc

SEQ ID NO: 7015 - DNA, 1400 bp, Mesocricetus auratus
ctgccggtggattgccgagggggtcccagagacggaccctctaatgtgcaaggctccccaggcccctgcctggccagcttgcgagtccctctttcccctggacttcctgacaccatggagttggccaagagcaagagcaagaagcgtcggaaccgcacaaccttcagcacattccagctggaagagctggagaaagtcttccagaaaacccactacccggacgtgtatgcccgagagcagctggctttacgcacggacctgacagaggcccgggtacaggtctggttccagaaccgcagagccaagtggcggaagcgtgagcgttatgggaagatgcaggaggggcggaaccctttcactactgcctatgacatctctgtgctgccccgaactgacagccatcctcagctgcagaactctctgtggcccggttcagggtctgggagcccaggggggccctgcctcatgtctccagagggtatcccctctccatgcatgtctccatactcccactcccatggaaacgtggctggcttcatgggagtgccagcctcccccgcagcccaccctggcatctattccatccatggctttcctcctgccctgggagggcacagctttgagccttctccagatggtgactacaagtccccaagcctcgtctcgctcagggtaaagcccaaagagccccccagcctgctgaactggaccacgtgatgggttacggggacacagaacgagctgctcactcctcttcctgctctcccctgctcctcgccccatctctgcctggacaccggacagaaaccctctgctccatgtctgggtgggtcccagaagcttgggagagaagcttcagggatcaggctacagggtcttaagctctaaaaaggtgggaccccctgagagactcaagcatgtaggacactttctgtaaactgggtcccctcgttcaaattgggctagagacactgcctgttttctcaaagactatttctaagtctggggagccagcccaggaagacgggaggagaatgcagactgagcagggaggagctctctctctgtggcactcagggctggcctcgcttctgcctttctaccaccagggggcgtttgctaagtgcccggagctgacacgtgcccagaggacaaaggtcagcttaataaaaggcgggggtttcctctgctccaagcatccctcaaatctttctgccccgtacccagtctatcaatatactgtggagtcattttctccaaggacggaaaagattccaccaatcattaaatatttggatttgctttcatgggatcaggccagggctatgccatggaaaccatattggatgttgatcaaaataaaacagatttttctagtctctgaaaaaaaaaaggaattc

SEQ ID NO: 7016 - DNA, 1400 bp, Mesocricetus auratus
  misc_feature (54)..(78): n is a, c, g, or t
  misc_feature (231)..(262): n is a, c, g, or t
cagccgtccctgggaagccaagtgaaaaccaggacgaaagacaaataccgggtnnnnnnnnnnnnnnnnnnnnnnnnngagctggagaaggagtttcactatagtcgatacatcaccatcaggcggaaagctgaattagctgccacactggggctctctgagaggcaggttaaaatttggtttcagaaccgcagagccaaggaaaggaaaatcaacaagaagaaattgcannnnnnnnnnnnnnnnnnnnnnnnnnnnnnnntggcatcacctccaccacagccctcgcagcctcagccagggtcgctgaggagcgtgcccgagcccttgagtcccgtgtcatcactgcaaggctcggtgcctggttctgtccctggggtcctggggccagctggaggggtgttaaaccccactgttacccagtgacccctcccatggtctgtagcggcggcagagcaattccaggctaagccatgaggagcatgggcgctgctagagtcctcagaagagacccctctcctgccacccacaaacaatacctacagatgaagaatggggacggaagtaaagacaagtgggactgtgggcctcaggggaagatatggtccagttttttattttttccattctgactcttccggccagtgatgacaaaggaagtgatctctgggccttcgttcatgctccctgccaggactggctacaagctttcagcctcttctgccccggctcttagcttcccatatggactgtgtatctggttggagggagtgaggctgggagaatgagcaatacttgagccgagatggctgtttcctactgactgctctctgagaaccagctggacgtcctgcctcaggggcagggacagttcaaactgcaggagccagaggcagctgcatcgcaggctgggctgatcaaagtctgcagagcccccaggtggtctgtgtttttcttctccctttacagacctggaagggttggtgggttcagggactgcggccagaggagggggtggtcaccaactccaggccctgcgacaagggcttgtttggaaagcctgtcaccagagctgctgtaggctgaatgtatgtctgtgttgtaaatgccagagccaacctggacttccggttctttccctagtctctggctggtgaagaacggagctgttgctgctgttggagtcattgatctgtgtaaccagctaagcaagcctttaaaaagccatgggtagacaggtgatacggtgtagggaagtaggggtatccgaacacagtcgacttttattttctaagaagacaagataaaccaactttacagatttcagatcctggcatttatcttctttggattttgacaaattattttttttcaggaaataaaatatgttctctgattgt

SEQ ID NO: 7017 - DNA, 264 bp, Mesocricetus auratus; identical to SEQ ID NO: 3375

SEQ ID NO: 7018 - DNA, 600 bp, Mesocricetus auratus
aggatggcaaggaccacaagcgacccaaacgtcccagaactatcttgacaacccagcagaggagagcattcaaggcctcatttgaagtatcctccaagccctgcagaaaggtgagggagactctggctgcagagacaggactgagcgtccgtgtggttcaggtgtggttccagaaccagagagccaagatgaagaagctggcgcggcggcagcagcaacagcaacaggatcagcagaacacacagcggctgagctctgctcagacaaatggtggtgggactgctggaatggaagggatcatgaacccctacacagctatgccaaccccacagcagctgctggccatcgaacagagcgtctacaatgctgaccccttccgacagggtctcactccaccccagatgcctggagatcacatgcacccctatggtgctgaacctcttttccacgacctggatagtgatgacacttctctcagtaacctgggcgactgcttcctagcgacatcagaagcggggcccctgcagtccagagtgggaaaccccattgaccatctgtactccatgcagaattcctatttcacctcttgagtcttctaga

SEQ ID NO: 7019 - DNA, 600 bp, Mesocricetus auratus
  misc_feature (145)..(171): n is a, c, g, or t
gacgttccaaggagcgaaggatgaagcagctaagcgccctgggcgcgcggcgccacgcctttttccgcagtcctcgccggatgcgaccgctggtggaccgcctggagccaggcgagctcattcccaacggccccttctccttttnnnnnnnnnnnnnnnnnnnnnnnnnnngtcccgggggcaactacgacttctttccgcaaggaccaccgtcctcgcaggcccagacaccagtggacctacccttcgtgccatcatctgggccttcagggacgccgctgggaggtctggaccacccgctgcctggccaccacccttccagcgaggcgcagcgattcaccgacatcttggcacatcccccaggggactcgcctagtcctgaacccagtctgcccgggcctctccactccatgtcagcggaggtcttcgggcccagtccacccttctcatctctgtcggtcaatggcggggccagctacgggaaccacctgtcccatcctcctgaaatgaacgaggcagccgtgtggtagcgggccttgcgtgggccacgggagctcgtggttgtacagagacgagcttttatttaaaaaaaaggaattc

SEQ ID NO: 7020 - DNA, 600 bp, Mesocricetus auratus
ctggcggccagcgctcccccacaagactccagctccaagtccccagagccctcggctgacgagtcaccggacaatgacaaggagaccccgggcggcgggggggacgcaggcaagaagcgaaagcgccgagtgctcttctccaaagcgcagacctacgagctggagcggcgcttccggcagcagaggtacctgtcggctccggagcgcgagcacctggccagcctcatccgcctcactcctacgcaggtcaagatctggttccagaaccatcgctacaagatgaagcgtgcccgggccgagaaaggtatggaggtgacacccctgccctcgccgcgctgtgtggccgtgccggtgttggtcagggacggcaaaccgtgccacgcgctcaaagcccaggacctggcagccgccactttccaggcaggcatccccttttccgcctacagcgcgcagtcgctccagcacatgcagtacaacgcccagtacagctcggccagcaccccccagtacccgacagcacaccccctggtccaggcccagcagtggacttggtgatcgccacctctccaagactcgaggccgtaggccctggccccaccc

SEQ ID NO: 7021 - DNA, 576 bp, Mesocricetus auratus; identical to SEQ ID NO: 3379

SEQ ID NO: 7022 - DNA, 600 bp, Cricetulus longicaudatus
cccccttctattccaatcatggccttgccatctctccgggtatgaagacacgtatccgaatgggacagtatgaatttcctaacccagaatggtcagaagtatcagaagaagtgaagatgcttatccggaatctgctgaaaacagagcccacccagaggatgaccatcacagaattcatgaaccacccctggatcatgcaatctacgaaggtccctcagactccactgcacaccagccgtgtcctgaaggaggacaaggaacggtgggaggatgtcaaggaggagatgaccagtgccttggccacgatgcgtgttgactatgagcagatcaagataaagaagatagaagacgcatccaaccctctgcttctgaagaggcggaagaaagctcgtgccgtggaggccgcagcccttgcccactgagccgctgtgtttcccaccccactggaggacaagcaataactctacatgaatatattttttaaacaaagagacacaagctgcccactgctgcctcctgtcctcctgggctatgtggagcccagatatcctctggctgattctgcccttggctctgacctccctggagaggagggttggg

SEQ ID NO: 7023 - DNA, 600 bp, Mesocricetus auratus
tatggtagtactgagaaacaggccttgcatgtgtaaagaacaagtaagaggaaaagaaagccttaatgatagatcgttcaagaaggttcacagaaaacgcccaaccttaggcctttaatatactttgttaccttgttaaagaagatttcattgctaccacaatcaaagagaacatggaatgcctcatctctggaaagtagatgtgacaacagattggagaatctatcatctaaagctgaagcgtttacaatcccttacagctaacgggctaccccctgagagtactgtcatacaaggtagcgccactgtctaagagatggaaatgtcacacaactgaagatgtaccagtgactgttctttgtggattttcaaatgcctctagaccagtggttctcaaccttcctaatgctgtgaccttttagtacagttcctcatttcgtgatgacttccaaccatagttattttcgttgccacttcacaaatgcaactttgactgttatgaatgtaaacatctgtgttttccgatggtcttaggcaacgactcctgtgaaagggtcatttgaccccttggaacctactggttgagagccactgctctag

SEQ ID NO: 7024 - DNA, 600 bp, Mesocricetus auratus
acatacctacttagttataaacaaatatatatacctaaaaatgtaaaccaaaactcaaataattgactcaagttagttcacatcatgtataatattagatatggtgatcatagtcattattataatacctcttacaggaagtctttactgtcacattgaattcttataccaacccccaagttaagataagaatttgggctttgggggtacagtcagtgtcagaaggactcatggtttgtaaacagcagagctagagttcactcatccctgagctggcccataccacatcatccaccctgttgatttgtgtagctctaagacaatgaattacctaccacattctttgaattccacttaatttaaacattgagcagaaaagaaaagctgtttggagtcagggtctcagtggtagagtgcttacccatcaggtgagagattggagtttcaaactcccaccacaccccccaccctcctgctgccccaatcttcaaaaatcaaaaaaggaaataacagctttaaatgatgatagtctttttactgtagataacttaattacagaaatagctgttaattttaggttttattaatatttataagcca

SEQ ID NO: 7025 - DNA, 382 bp, Phodopus sungorus; identical to SEQ ID NO: 3383

SEQ ID NO: 7026 - DNA, 397 bp, Mesocricetus auratus
atgcttgttcataacaagttggtggaccccctgtatagtatcaaggagaaggaaattcagaaaagccaggctgctaagaagccatacagcgactagcctgtgccaagtcacgagtacctccgagcgagacaggcaggtctttctggaaactgtaagagagtaggattacttcgcttcagttcactgtggttgctgcagacccttttggctaggaacatactggctgtggggaacattgagtttagctatggagaacagtgtttataacttttacctttttcagtcctggggtttgaacctagggccttgcacatgccaggcaagtgctctactgagctatgtctccaacttgtttacaatgtgatattttctattaaatctaatattttcaaaaaaa

SEQ ID NO: 7027 - DNA, 694 bp, Mesocricetus auratus; identical to SEQ ID NO: 3385

SEQ ID NO: 7028 - DNA, 506 bp, Mesocricetus auratus; identical to SEQ ID NO: 3386
  misc_feature (78)..(97): n is a, c, g, or t

SEQ ID NO: 7029 - DNA, 600 bp, Cricetulus griseus
  misc_feature (291)..(377): n is a, c, g, or t
acatatcatacacagacacatacacaaataattttaaaaatctttaaaagtgttaaaggagacctaaatatgctcttaaaacacagatcacatcaggaatgaaatccactcctggtgtctgaaataattgtctttactgacctttccagcaggaaaaatgttcatctcatagcaggtaatttttcttttaggggtggggctctgtcaactttgaatgcattggaaatgtagagttttctggccttggcagaaattataaaagtgaaacaacagatgaaaacaaaacttttnnnnnnnnnnnnnnnnnnnnnnnnnnnnnnnnnnnnnnnnnnnnnnnnnnnnnnnnnnnnnnnnnnnnnnnnnnnnnnnnnnnnnnnctgtctcaacaaaaccaaacacctaagactaaaagcaaaccaaaccacagcagcaacaaaaaaaaaccctataaaacaaacaagggaacttcagctgcaatacaattaaaaagaatatttgttaagtacaggacctagaccttcaaaatagcgcttttggtacacagtgagctaaacacagtcgaggtagcaaagattataatcgtgcggcaaagacaagctt

SEQ ID NO: 7030 - DNA, 600 bp, Cricetulus griseus
tgtttgtttttctgtgtggcttattttgtgtatagccttctgtctagctctaactccagcatttagttcagaatgtctaaaatggattggctaggagccagtgagagtcaggaggggaagtagagctgctttggatctctgggcgcacctgctacagtctgaggccagatacagatgggccctcctacctgctcagagtcaggggttagggagtgggggcckgccagtctctgtgggctcccagccaagccctccatcacacaggcttacctattctgaggcaggaggcccctagtgcctctccacccaacagcagctgtggcaagcatctgcagcctacacaggaagtaccctgtgctgtccagggcctgtctgcttcccttctttacaggcacagcaggcaaagaggtgcactgcaaattgcaccatagacttggggtagaaagtgaattgctagagataaactaaaatacaagcagctccagctccagctccttacaacacaatctaacagtgatgtctgtcaccatgcctgccatctttacgtcagaatccccaagggagagatctggaaagagtattgtagacaggctatctaga

SEQ ID NO: 7031 - DNA, 600 bp, Cricetulus griseus
gggccaagccaggccaaccctggccggggtggcgcccacgtggcgttaaggaaacagggaaaatggtgggggtgtggccagagggccgggggcgtggccgaaacggggsgtgaccgcagacttggcggggcctggggcaagcgaggttggcgcgcagccgggaaggtttaggcggggtcgcacctgttgcgcgactgccccacggccccgccacgggattgggatctctaattgattcccagaaactagtgaaagaaccctaggcgaattccgggttcggttttctgtggagcacgtggcctgcttcctcttgagtgcgggctgggggtcgcgacaccggggtctcctgaggtcagtctggcagctgaagcccgtgggagtccgccttcgtccagctggccattttgagaagcagccttccttcccgcctcagtgcgggtgcaggggccaggggcgcgacttcgcccctgtgggccctctcctctcctcagccgcgcttccccgcggtgtagactaggcagcctccctggtaccactcgggactcgggcagtatggcctcaggtaagcgtgtggcgcgtgtgttggcgttagagggatcc

SEQ ID NO: 7032 - DNA, 600 bp, Cricetulus griseus
  misc_feature (450)..(491): n is a, c, g, or t
agtgtggctagtacagtttaaagaatgtgtggccaagaatcgtaagacccaggctccagtactggttctgcttagcacagtagaaatttttctgtagcaaaattcccctcgcctatataatgaaggtcacttccttacctacttcacagggccattctcaagagcacaaatctaactgaagggaaagcacatggaagctgctgtggttggcggcaaccgatgtactatcacacttggttattagaataaactatctcaaagtgtatcagcaaaacttccttacattgatcgataaactattaaaaattaaaccctgccccctgggtttttactagcagatcaatatgcctctgctcagagacccgcatcactggagaaagcatgtgagtcctgcctcatttcttagggcattcattcagaaatgaccgtctttattatcccactctcccnnnnnnnnnnnnnnnnnnnnnnnnnnnnnnnnnnnnnnnnnntatactgttaagtagtgtctggctgaacttgagggcatcagcataccccccacttaagacgttaccaccgccacttctgtaggatttgaacaagcaagcaatctgaatt

SEQ ID NO: 7033 - DNA, 541 bp, Cricetulus aureus
tgctagtgagctgtcgaggctgtctgtcaacagtgtgactgctggagactactctcggccccttcacatctctactttcatcaatgagctggattcaggtttccgccttctcaatctgaaaaacgactccctgaggaagcgctacgacggcttgaagtacgatgtgaagaaagtagaggaggtggtctatgatctttccatccgaggcttcaataaggagacagcagcagcttgtggtgaaaaataggagcctctccctgtggctggccttgccgactaggcatttgccagggagggctagcacagtgcctctcctctagttagcacgccagttgctaaacactgcgctttattttcgtaaccagctgtgtggcgtgaatatcagaattgagatactttttggatctaaaaaaaaaaaatcctttccactgataggattttctttgttgacgtttcagtgaacttgctgtgtaatttgttgtagtatcattttgtcaaaagtgtaaatgttggtctcttggtaaaagtccttttcttgctt

SEQ ID NO: 7034 - DNA, 369 bp, Mesocricetus auratus; identical to SEQ ID NO: 3392

SEQ ID NO: 7035 - DNA, 308 bp, Phodopus sungorus; identical to SEQ ID NO: 3393

SEQ ID NO: 7036 - DNA, 600 bp, Cricetulus griseus
  misc_feature (182)..(197): n is a, c, g, or t
acaatcctatacgagtagtcaacccagatattgttgttgcaaaattgcgtcctggccaggaaatcgatttagaagctcatgcaatcttaggtattggacaagaccatgctaagttttctcctgttgctactgcctcctaccgcttattgcctactatacatatcttgtctcctattgaaggnnnnnnnnnnnnnnnntttcaaaaatgcttccctaaaggagtcatcgagcttgaggaaggacctgatggtaaaaaacaagcccgtgtagcagacgttcgaaaagacaccgtatcccgcgaatgcttgagacatcccgaatttgcagataaggtgcaattaggccgcgtacgcgatcattatttgttttctgttgaaagcaccggtattatgaagcccgatgtcttgttcattaaaagcattgcagtcctaaaatcgaaatgtctagccgtaaagtctagtcttcagaatattttttctgactgaatgtctgttaaattagttttatatgtaatcttttggataattgggtacgctgttaaaaaatatacttttgaaagttattgatttttatatttcaatattaacattttgtcctttc

SEQ ID NO: 7037 - DNA, 600 bp, Phodopus sungorus
  misc_feature (159)..(177): n is a, c, g, or t
atctgggacaagaccatcccctatgatggcgagtctttccacctggagtacatggacctggatgagttcctgctggagaatggcatccctgccagccccacccacctggcccagaatctgctgctgcctgtggcagagcttgaagggaaggagtctgcnnnnnnnnnnnnnnnnnnnccaccatcctcctctactgctgtctttcagccctcggaaaccgtgtccagcacagaatcatccttggaaaaggagagggagactccaagtcccattgaccccaactgtgtggaggttgatgtgaacttcaatcctgaccctgctgacctggtcctctccagtgtgccaggtggggagcttttcaaccctcggaaacacaagtttgcagaggaagacctgaaaccccagcccatgattaaaaaagccaagaaagtcttcgttcctgatgagcagaaggatgaaaagtattggacaagacgcaagaagaacaatgtggcagcaaaacgctcccgggatgccaggcgcctgaaagagaaccagattaccatccgggcagccttcctggagaaggagaacacagccctgcggacggaggtggctgac

SEQ ID NO: 7038 - DNA, 600 bp, Cricetulus griseus
acaccattggtggggtgaagattaactttcccttgtaaagcttatccagcacagcttgctatgatgaactttattgtcagaggactaaacagtagtcagcattgtttgttggagagtcccacaggaagtggaaaaagtttagccttactttgttttgcattggcatggcaacaattttctactggaaagccggtggatgagggcttgaataaaaagcttgaggtgccatcatcatgctgttgtgcatgccattcaaagagctttatgtacagcaacacggacatgggtacttcccctcatttcagtagtccaagcaaactgtctgagagaaatggcttttcaccaccctgtcaagattctcctgaaaaaaatactctggctgcaaagttatctgccaagaaacaggcatctaaacacagagatgaagatgatgattttcaaatggagaagaaaagaatccgacccttagaaactgcacagcagatgagaaaacgtcattgtttggaaaaggatgtccaccatttggatgcacgggtagcttcggaaaagaaagtaaaacctgagtctcctgtaggaaagacaagctcctctttccaaaat

SEQ ID NO: 7039 - DNA, 1379 bp, Cricetulus griseus
  misc_feature (1163)..(1224): n is a, c, g, or t
tgtggtggggtcatacttgtacaatggaaaccagcacaagctacaaaagttgtggtagagcagagtccattattaggctttggtgcaatagctattgctgtattgtgctctggatttgcaggagtttattttgaaaaagttttaaagagttcagatacttccctttgggtgagaaacattcaaatgtatctgtcagggatcgtggtgacgttagttggtacctacttatcagatggagctgaaataaaagaaaaaggatttttctatggttacacgtattatgtctggtttgtcatcttccttgctagtgttggaggcctctacacttctgttgtggtcaagtacacagacaacatcatgaaaggcttctcagcagctgcagccattgttctttctaccattgcttcagtgatgctgtttggattacagataacactttcctttgcaatgggagctcttcttgtatgcatttccatatatctctatgggttacccaggcaagacactacctgcattcaacaagaagcaacttcaaaagaaagagtcattggtgtgtgattggaatcttaagatactcctataacgactaaactgtcaataataaattagagccttaagtcaaccccagatggtagcttaaacaatatcaacaaaattactgtatggcattaaggtacagagaactgtatgagtgaatgcttaacagatttatttagagtgtttggtatcaagctgtattatttcagaatgaaggactttactacagagagagagtgtgtgtgcatgtgtgtatgtatactgtgtacacagagcatggagtttacatggtatcaagaggcatgcacagaggagacaacacagggttacaacatcaggtgaaactacaatattcaatcaaggtttaagatttggtatctgaaggttcaagtgccaaagccatttctgtcacactgttctctcgttcaggtaccaggaggggaagcttagccttccttgttgtccagttcatggatagtactttgtccctgtagtagcaaaaaatctagctgcttttatcaaagtgaagaatgaataagataagacagttcagaacaaaaccagtgtgtaacttctaaaacagaacctatttcatggctcagacactgacttctgtcgtttgaatnnnnnnnnnnnnnnnnnnnnnnnnnnnnnnnnnnnnnnnnnnnnnnnnnnnnnnnnnnnnnnagctgatatacttttcagaaaattttctaagtcgcttttatactttcttttttataaagtatggttacctgttgggctctcaatttgtgaactttaagtgatttaaaatatttctataatgttaacggggaaatccagcaataaatttatttata

SEQ ID NO: 7040 - DNA, 1378 bp, Cricetulus griseus
  misc_feature (631)..(653): n is a, c, g, or t
tgtgcccagtgtggaaaaacaaagtgcatgatgaagtcttcagactgtgtcatcaagcatgctggtgtatacagtactggccttgctatggtgggtgcaatatgtgacttctgtgaagcttgggtttgccatgggaggaagtgtcttagtacccatgcctgtgcctgcccactcactgatgcagagtgtgtggaatgtgagcgaggggtttgggaccatgggggcagaatattcagctgttcattttgccataattttctttgtgaagatgatcagtttgagcatcaagccagctgccaagttttagaagcagaaacatttaaatgtgtttcctgcaaccgccttggccagcattcatgtctgcggtgtaaggcttgtttctgtgatgaacatacaaggagcaaggtgtttaaacaagaaaaagggaaacaacctccttgcccaaaatgtggacatgaaactcaggagacaaaggatctcagcatgtcaactcgctccttgaaatttggcaggcagactggaggtgaagagggagatggagcctctgggtatgatgcttactggaagaacctgtcatctgacgagtatgctgatactgggtaccatgatgatgaagaggaggatgaagcannnnnnnnnnnnnnnnnnnnnnntgggaaggattcagatgctgagtcatcagatctgttcactagtttgaacttaggaaggacctatgccagtggctatgctcactatgaggagcaggagaactaggagcagctcccgctggcacttgaagaagagcaggctgaatcatgaggatgctcagacgtcccctcccttggccttgtccaaaaggctagtcatactagggtacattctggcggtttgtaggaactgatactggacttctagtgtaaggaaaatgggttaaatgtaatggagtatcatgaattggattattactgatttcaatcatctggtaggttttgtcagttagatacatataaaatacatgataaaggaatagaaaggaaatatatttatttgaaattaaattgctgtttttattaaaagcactgcttataacttgcatgtatctgattttacaaagagtaacgggtaaaattactgtattcttttatttcaatccatacaatgatagtcatgttatattctgaattttcactgactatttatgctgtcttaagtagtcgtatctgtgttaagtggttgacgtgttcatctttttcttacaatgtatgtcctcaccagtgcttgttaatgcctcactgactgacagaaatctagctgttttcatacacataatgccaggactagtattgctgatgcttcacccagagaacttcacttttaaaataaatctactataaac

SEQ ID NO: 7041 - DNA, 538 bp, Cricetulus griseus
gaggactgatgaagatgctgttctgatggatggaatgactgaatctgatactgcctcagttaatgaaaatgggctagtcacagttgcagattatatttctagagctgagtctcagagcagacaaagaaacctcccaagggaaactttggctaaaaacaagaaagaaatggcaaaagatgtgattgaagagcatggtccttcagaaaaggcaataaatggtccaactagcgcttctggcgatgaaattcctaacgtaccgcgtactccaggagaagaaaagactaagaacttaaaagaagaaagcactcaagaagcagcagtcctgaatggtgtttcataactgaaggaagttcctagtttacagttcttttacattacagttacaatagtgcttgtacaagcttgccaaagatagaatatggatcgccagtctttacatcgcactttcagttcctccatttggaattcagaaaggggagggatcctgaagaaatcatatgttaaacatactttgacacctactgtgttaaaaatatat

SEQ ID NO: 7042 - DNA, 600 bp, Mesocricetus auratus
tggagaagtcttcatttgttcatgtctaatgcagaatctaacctgaccaatgacacccaagaatcaagtgacctagccactttccttggaggggggcagtagaaggagctcagtgacattttagagtccttggtctttgtctaccttgtattcctgaggagccaccaccctctggtttgccaaagttggcaagtctacagttgcttcctggaacctggagtacccagtgcttgacttcaaaaagaggacacagatgtccagattcccacaacctctgacttgggctcccccccactgcctggacaccccaaaagtggcctgttgttgagctcagtttcaatgggaacagaaactgggtttaaggaaagagattatttacttattccacagagaagataaccaagtaaatagtgcaatatcctaagtggtacccaagccctgcctactacctcttgtgggcttcctagaacatataaaaagccacctgatgcccccacacttatacacactactataccaccccacatccagagacagccaagcctcccagactccaccatgaagattgccatcacaatggctgttgtcatgctgtcggtc

SEQ ID NO: 7043 - DNA, 579 bp, Cricetulus griseus
atggcactggatctttaaagcgcagtggctcctttagcaaactccgggcttccattagacgcagcagtgagaagctggttaggaagctgaagggaggaagtgcacgggacagtgagccgaggaaccctggggcgtccccagcagagcctctttgtgtggaaaacgtacagcagcagcctagaagacgctagcactaactgacctgagcctggcctgctctaaacaccatgatgctgctgagtatggctccagagctggccctgtgaaggccatggtggggctgggagggcctgcggctgggagcccagtgctaacttagtccccctgccctcgtgctgcgcgaccactactaataaccactaccactaggagggttttggagagcagctctcacgcagtaaggtggtgacctgcccctgtccttcctgggaggccccgggacaggacacatcggctcctgctgcttctgcctggccgtcctgtggcactcctcatgtgtttagttctctgtgttgtgtgtgataatgtattttattgttacatttttaaattaaaagttatatgccttttacgtttacc

SEQ ID NO: 7044 - DNA, 577 bp, Cricetulus griseus
  misc_feature (125)..(154): n is a, c, g, or t
ctgcggaagccctttggtgactttatggagcccaagtttgagtttgctgtgaagttcaatgcactggaattagatgacagtgacttggccatatttatagctgtcattattctcagtggagaccnnnnnnnnnnnnnnnnnnnnnnnnnnnnnnaggacattcaagacaacctgctgcaggccctggagctccagctcaagctgaaccacccagagtcctcacagctgttcgccaaggtgctccagaagatgacagacctcaggcagatcgtcacagaacatgtgcagctattgcatgtgatcaagaagacggagacggacatgagccttcaccccctgctccaggagatctacaaggatctatattagcataaaaaaaccctcccccccaccccccggctgacgtgctccctctttcaattgcactattactctggaggggaaaatctgacaattaagaaatttactgtgaaaaagcattttaaaaacaaaaggttttagaacatgatctattttatgcatattgtttataaagatacatttacaatttacttttaatattaaaaattaccacatt

SEQ ID NO: 7045 - DNA, 238 bp, Mesocricetus auratus
  misc_feature (55)..(55): n is a, c, g, or t
  misc_feature (88)..(88): n is a, c, g, or t
  misc_feature (109)..(109): n is a, c, g, or t
  misc_feature (124)..(124): n is a, c, g, or t
  misc_feature (130)..(131): n is a, c, g, or t
  misc_feature (192)..(192): n is a, c, g, or t
  misc_feature (198)..(198): n is a, c, g, or t
cctgaggtctagaggaagggcctccgctgtacacataacacatggcctggctaancccattggttgcataaaactgtctgtgttagtncaggcacgggtgtcctaggtncttcacaaccctgtncactgnncagcagggtacaggctggcaggaatattcagttagctctctttataatttgaattctcttncttttngagtactttctgttaatctctccccaacaattactgacct

SEQ ID NO: 7046 - DNA, 1400 bp, Cricetulus griseus
  misc_feature (264)..(283): n is a, c, g, or t
ccttcttaacatgtacattgagactgagggaaaaatgataatgcaggacaaactggagaaggagagaaacgacgctaaaaacgcagtggaagagtgtgtatatgagttcagggacaagctgtgtggaccatatgagaaattcatatgccaacaggaacatgaaaagttcctgaggcttcttacagagacagaagactggctgtatgaggaaggagaggaccaggctaagcaagcatatatcgacaagttggaagagttgatgannnnnnnnnnnnnnnnnnnngttcgatttcaagaagccgaggaacggccgaaagtattggaggagctggggcagcggctgcagcactatgccaagattgcagcagacttcagaagcaaggatgagaaatacaaccacattgatgaatcagaaatgaagaaggttgagaagtctgttaatgaggtgatggagtggatgaataatgtcatgaacgctcaggctaaaaggagtcttgaccaggaccctgttgtgcgcactcatgaaatacgagcgaaggtcaaggaattgaacaatgtttgcgaaccagttgtaaatcaacccaaaccaaaaattgagtcacctaaactggagagaactccaaatggtccaaatcttgacaagaaagaagatttagaaggcaaagataattttggtgctgaagctccacatcagaacggtgaatgccaccctaacgaaaagggctctgtcaatatggacctggactaggcgctgctggcttcctcctccagttcatgaaatgtgtttgccatagtatgtgattctgtacaacagactttgtcgtctatttatattttcttttcttttttttaaaagactgtctataaattttgtgtattatatgggaaaaaaggaaaagcctgagtctgtagtctttgaccctaaggagaatagccttggtgacagagtcgtgtggctgtgtgacccacactgagtactctacagtattgccacttggactgctgaggagtttgagtttgtcttttgaggagacaactcatcttgcttgttcaaatgctctgtgatgagacttttggagcagttgttctcctgcaaggctgtttcttttgcattttgctctccatttccgcatgtgtgtggctgtgggtgtttataatgagactaagtctgatttgcataagggctttcaaaaattaagtctgtcccgtagattttgctttcattattacaaattcaacgagtacaacacagctaatgaattgtagcagcatgcaaagcaaggctgtaactatcaccatacagtgcactgtcccgtgagtgtgacacgggcaaatatatgaatcatgtgaccattgtgactgccccatgagctttaaaataaagttcacccagtggtgtc

SEQ ID NO: 7047 - DNA, 440 bp, Mesocricetus auratus; identical to SEQ ID NO: 3405

SEQ ID NO: 7048 - DNA, 600 bp, Cricetulus griseus
agaaaaggcaaggcaagtgttttctgagatggatggtggtgctaaacagttactttccacattgtctctggaaagtcatgaacaatcagaccattctgggagaagagaaaactctgtgacacataaccctgaggatgtattgtcactcccaaaaacctttgcaagcaatgccaattcatctgtattctctggatttagtacagcaggtggtaaacgggtcacagtttcagaaagtgccttacacaaagttaagggaatgttagaggaatttgatttgatcggaactgaacatactctccagtgtccacctacatctgaaggtgtatcaaaaatacttcctcaatattgtgttgaaaagagaaccccagaataccctataaactctaaattgcagaaaacctatgatgataaattcagtttaccaaacaactataaagaaagtgcttctttggggaatactcattctcttgaagcttctccccaactctctcagtttaagcaagacacacggttggtattaggaaccaaagtatcccttctggaaaaagaacaaaccttccctcaaaatataaaaacagaaagtggtgtaatggaaactag

SEQ ID NO: 7049 - DNA, 211 bp, Mesocricetus auratus; identical to SEQ ID NO: 3407

SEQ ID NO: 7050 - DNA, 159 bp, Mesocricetus auratus; identical to SEQ ID NO: 3408

SEQ ID NO: 7051 - DNA, 239 bp, Mesocricetus auratus; identical to SEQ ID NO: 3409
  misc_feature (120)..(122): n is a, c, g, or t

SEQ ID NO: 7052 - DNA, 99 bp, Mesocricetus auratus; identical to SEQ ID NO: 3410
  misc_feature (47)..(47): n is a, c, g, or t
  misc_feature (52)..(54): n is a, c, g, or t

SEQ ID NO: 7053 - DNA, 189 bp, Mesocricetus auratus; identical to SEQ ID NO: 3411

SEQ ID NO: 7054 - DNA, 71 bp, Mesocricetus auratus
gatctgtgattagtctgggggtgtcgggagtgatggggagaactcttgggggaaggtgcatgactaccgca

SEQ ID NO: 7055 - DNA, 98 bp, Mesocricetus auratus; identical to SEQ ID NO: 3413

SEQ ID NO: 7056 - DNA, 141 bp, Mesocricetus auratus
  misc_feature (28)..(28): n is a, c, g, or t
  misc_feature (33)..(33): n is a, c, g, or t
  misc_feature (64)..(64): n is a, c, g, or t
  misc_feature (82)..(82): n is a, c, g, or t
ggccataatgtactcactataggcgaantcganctcggtaccaagaccattgacaagaaacaanagcacttcatgctgaagncctagagagactagggaaacaagggacatacttcagtgtaatactggcaattaactccg

SEQ ID NO: 7057 - DNA, 100 bp, Mesocricetus auratus; identical to SEQ ID NO: 3415

SEQ ID NO: 7058 - DNA, 179 bp, Mesocricetus auratus; identical to SEQ ID NO: 3416

SEQ ID NO: 7059 - DNA, 230 bp, Mesocricetus auratus; identical to SEQ ID NO: 3417

SEQ ID NO: 7060 - DNA, 114 bp, Mesocricetus auratus
gccagtgttgtttctcaattatgcttcactttatttttgagtcattgtctcattgaatatggaggttcctgtttcagatagatgagctggccaagaagccttaacaaccctcct

SEQ ID NO: 7061 - DNA, 143 bp, Mesocricetus auratus; identical to SEQ ID NO: 3419

SEQ ID NO: 7062 - DNA, 600 bp, Mesocricetus auratus
catcctgagtcggccctccatgccggtggcctcgggggccgccctcccttccgcctcgccctcggggtcgtcttcctcctcctcgtcgtccgcctccgccacctcggcctctgcggccgccgaaaagcacaagtcgagcagcggcggcctcctgctgcacgcgtccgaggccgagggctcgtcctgagcgccgcccgcccgcccgcccgcccgctgctgcgggatcccgggccgccccgaccgcgcccctcagccggtcacccccgggcccagcaccgcggctgctccccgggcctttactattttctaagatgtacatatctatttttttaacccagaaatcgtggcggggcctggggggataggacggcgcgttgacgagaaggaagggagcccgccgagtgcgccgcgttaaatgacgaacccgcatccccgcggctcccctggacccttcccacccgcggtgtcagtcaatccccacccccatccaggctcggtcccttgctctgtggtccctgagctccggggttcgtgtttgtgaagagtcgacagccagcgcctggtgggaatctccgagccacacagggcatctgccaccta

SEQ ID NO: 7063 - DNA, 316 bp, Cricetulus griseus
  misc_feature (28)..(110): n is a, c, g, or t
tccgactacaacatccagaaggagtctnnnnnnnnnnnnnnnnnnnnnnnnnnnnnnnnnnnnnnnnnnnnnnnnnnnnnnnnnnnnnnnnnnnnnnnnnnnnnnnnnnntgagcccagtaacaccatcaagaaaagcaaacaggaagatggacgcacctttctcactacactgtctagaaagagcacaccttgtgcttgttcttgggcttgaggggaggtgttttaatttaccccatcttttaagttgttaacaagtttcattgcactttgaataaagttcttgcattcccaaaggtgttggatctcgttttagc

SEQ ID NO: 7064 - DNA, 111 bp, Mesocricetus auratus; identical to SEQ ID NO: 3422

SEQ ID NO: 7065 - DNA, 503 bp, Cricetulus sp.
aagcttttaccgccaagaggatcccagagaagaggctggagagctacaagagaatcaccagcagcaagtgtcccaaagaagctgtgattttcatcaccaagctcaagagagagatctgtgctgaccccaagcaggactgggtccagacatacacaaaaaaactggaccagagccaagctaaatcagaagctgcaactgtgtataaaacagcacctttgaatgctaacttgacccatgagtctgcagttaatgcatccactactgcctttcccaccacagacttgagaayttctgtaagagtgaccagtatgacagtgaactagtgtgacctggaatgtgatgccttaagtaatattaactttatttaacttattaatgtttcaatatccccctccctgtatacttggatttcttagatgcatgacgtggtttcattgttttccctctgtgaaccctggttctccaccctaaatgttatgagagatgacttttgtaaagatgag

SEQ ID NO: 7066 - DNA, 600 bp, Cricetulus griseus
  misc_feature (100)..(327): n is a, c, g, or t
gataaccgtggcttcatggtgactcgctcctatactgtgggtgttacaatgatgcaccggacaggtctctacaactactatgatgatgagaaggagaagnnnnnnnnnnnnnnnnnnnnnnnnnnnnnnnnnnnnnnnnnnnnnnnnnnnnnnnnnnnnnnnnnnnnnnnnnnnnnnnnnnnnnnnnnnnnnnnnnnnnnnnnnnnnnnnnnnnnnnnnnnnnnnnnnnnnnnnnnnnnnnnnnnnnnnnnnnnnnnnnnnnnnnnnnnnnnnnnnnnnnnnnnnnnnnnnnnnnnnnnnnnnnnnnnnnnnnnnnnnnnnnnnnnngccattgacaagaacaaggcagatttatcacgcatgtctggcaagaaggacctgtacctagccagtgtgttccatgccactgcctttgagtgggacacggatggcaacccctttgatcaagacatctacgggcgtgaggagctgcgaagccccaagctgttctatgctgaccaccccttcatcttcctggtgcgagataatcagagcggctcgttgctgttcattgggcgcctggtccggcccaagggagacaagatgcgagatgagttgtag

SEQ ID NO: 7067 - DNA, 606 bp, Cricetulus griseus; identical to SEQ ID NO: 3425
  misc_feature (407)..(425): n is a, c, g, or t

SEQ ID NO: 7068 - DNA, 1380 bp, Cricetulus griseus
aaaagagaaaaaaaggatattgtgaatgttgcttacagaaatacgaagatcttgaaactcaccttttgagtgagaaacacaaaaacttcgcacagagtaaccagtatcaagttgttgatgatattgtatctaagttagtttttgattttgtggaatatgagagagacacacctaaaaagaaaagaataaaatacagcgttggctccttttcttctgtttctgcaaatgtcctgaaaaacactgaaccaaaggagaagctacagttggagcccattttccagaaggacatggtagaaagtaatggacaactgcctgaggagatttttcagtgtgaagatatccagtgtgaagatatccagaaacctgaacaaaggcttgtgttggcttcagaacccatgtcctactcttcaacgggattgaaaggacgtgatgagaaagcagccagcatgttaaatgccagtgaacctgacataaaacagaagtttacacagctacctccatgtaaaaatgaacaggaaggaattcttgatgtttctgaacataaattaattattaatagaaatgatttagaacagagggttggtgactctgtaggtgtgccacggtcatgtgtacaagtttctcatctcagtccagaaaatagtctaccccaaccaaaattaacagcagatactacacatttttcagcaaaagatttacaagaaaaggaccttcattttgtgtttggtcatgattctgatctggtgacattaaatacatcaaaagaacagctaacagtgaaggccggaacgccatcctgtggtcctcagcagcccaatgagtgtgacacggagaatacagataacttgccttgtggtaagatccagcggaaagtgagactgttattagggcagaagaaaaaaaatgtggacccaagtgctgaattggataaaaaaagaactgagtttcttcctatgtgtgaagacagaacttgtgggtcaccagtacagtctctactggacctttttcaaacaagcggggagaaatcagattttttggggtttaccagctacactgaaaacagtgggctatgtgatgttttagatgtttgggaggatgaaaattcaagtagtctgctctcaacatttttctcttccccttcagcttctacattcattggattttagtatttaatgtgtttttcagaagtgacagttttattcttggaatttttataaatacatatataattcttaggagtctgctttttggttttggtttgttctttgccagctttgttgctagaaccatatgtaaatactaagatgatgtttataattttttacagaattgagtagctgttacaaattatacaataaaatcttgtgatttattttacat

SEQ ID NO: 7069 - DNA, 391 bp, Cricetulus griseus; identical to SEQ ID NO: 3427

SEQ ID NO: 7070 - DNA, 1400 bp, Mesocricetus auratus
  misc_feature (438)..(458): n is a, c, g, or t
aactacagaacaatgtgctaagcagtgctaaattgttctcatgaagaaaacagtcactgcatttatctctgtaggccttttttcagagaggccttgtctagatttttgccagctaggctactgcatgtcttagtgtcaggccttaggaaagtgccacgctctgcactaaagatatcagagctcttggtgttacttagacaagagtatgagcaagtcggacctctcagagtgtgggaacacagttttgaaagaaaaaccatttctctaagccaattttctttaaagacattttaacttatttagctgagttctagatttttcgggtaaactatcaaatctgtatatgttgtaataaagtgtcttatgctaggagtttattcaaagtgtttaagtaataaaaggactcaaatttacactgataaaatactctagcttggnnnnnnnnnnnnnnnnnnnnntagcgttgtccaggaaaccctgcttgcttgccaagcctaatgaagggaaagtcagctttcagagccaatgatggaggccacatgaatggccctggagctgtgtgccttgttctgtggccaggagcttggtgactgaatcatttacgggctcctttgatggacccataaaagctcttagcttcctcagggggtcagcagagttgttgaatcttaattttttttttaatgtaccagttttgtataaataataataaagagctccttattttgtattctatctaatgcttcgagttcagtcttgggaagctgacatctcatgtagaagatggactctgaaagacattccaagagtgcagcggcatcatgggagcctcttagtgattgtgtgtcagtattattgtggaagattgactttgcttttgtatgtgaagtttcagattgctcctcttgtgactttttagccagtaacattttatttacctgagcttgtcatggaagtggcagtgaaaagtattgagtattcatgctggtgactgtaaccaatgtcatcttgctaaaaactcatgttttgtacaattactaaattgtatacattttgttatagaatactttttccagttgagtaaattatgaaaggaagttaacattaacaggtgtaagcggtggcttttttaaaatgaaggattaaccctaagcccgagacccagaagctagcaaagtctggcagagtggtaaactgtcctgctggggccatccaatcatctctctccattacactttctaactttgcagcattggtgctggccagtgtattgtttcattgatcttccttacgcttagagggtttgattggttcagatctataatctcagccacattgtcttggtatcagctggagagagttaagaggaagggaaaataaagttcagatagccaaaacac

SEQ ID NO: 7071 - DNA, 77 bp, Mesocricetus auratus; identical to SEQ ID NO: 3429

SEQ ID NO: 7072 - DNA, 141 bp, Cricetulus griseus; identical to SEQ ID NO: 3430

SEQ ID NO: 7073 - DNA, 600 bp, Cricetulus griseus
taccccaactagtccttcttacagtcccagctctccagagtataccccaacctctcccaaatactcacctacaagccctaaatattcacctacttctcccaagtattctcctaccagtcccacctactcacctaccacaccaaaatactcgccaacctctcctacatactcgccaacctctccagtctacaccccaacctcccccaagtactcacccaccagccccacctactcccccacctctcccaagtactcacccaccagccccacctactcccccacctcccccaagggctccacttactcccccacctcccctggttactcacctactagccccacctacagcctcaccagcccagccatcagccctgatgacagtgatgaggaaaactaagggtgagcagggcgcagcagcagcaggttagggtcagacagccttagtggcctgtgcagtcacttcccttgagctgtgaccctagcctgggccccttgtacataactccttgtgacagaaccctctggaggttctagatcccatttttgatgggcttttcgtcttgtcctcactcgtgctgtcttgggactcactgacagctg

SEQ ID NO: 7074 - DNA, 600 bp, Cricetulus sp.
caggaggtgctgtcctcggatgaaaatgggggtccctatagctcatcccttggaaacgaagagggggagtcaaaaaccttcactaccctagaccctgcatccctagcttggctgactgaggagccggggccagcagaggtcacaagcagctcccagagcccccgctctccagattccagtcagagctgtatggctcaggaggaagaggaagatcaaggacgaaccaggaaacggaaacagagtggtcagtgcccagcccggggcactgggaagcagcgcatgaaggagaaagaacaggagaacgagaggaaagtggctcagctagctgaggagaacgagcggctcaagcaggaaatcgagcgcctgaccagagaggtagaggccactcgtccgggctctgatcgaccgcatgtaaatctgcaacaagtatgaacaattgggactatcattccccaacttgagtgacctcctgtctctcctggaccatcatgtcaatgccaaggatgctgggtagggagaacaaaggtctcagctagtgtgtatatatattgtacattctttattattttattgtctgtacccggtaaagtgactttgtat

SEQ ID NO: 7075 - DNA, 1400 bp, Cricetulus griseus
agcaagcagcaggtgcaggttgtgggacttcaggagtacctggttaactgtgctgatgatgtcatcaagatgctcaacatgggcagtgcctgcaggacttctggacagacttttgccaactccaattcttcccgctcccatgcctgcttccagattcttcttcgagccaaagggagattgcatggcaaattctccttggtggatctggcagggaatgaacgaggggctgacacttctagtgctgaccgccagactcgcatggagggtgcagagattaacaagtctctcctagcactgaaggagtgcatcagggcgctgggacagaacaaggctcacaccccattccgtgagagcaagctgactcaggtgctaagggattcattcattggggagaactcgaggacttgcatgattgccatgatctcaccaggcataagctcctgtgaatatactttaaacacgctgagatatgcagacagagtcaaggagctgagcccccacagcgggctcagtggagagcagccaattcaaatggaaacggaagagatggaagccagctctaatgggacctcgctggcagtcaatttcaaggaagaagaggagctgtcttcccagatgtccagctttaatgaagccatgagtcaaatcagggagctggaagagagggccatggaggagctcagggagatcatacagcaaggaccaggctggcttgagctctctgagatgactgatcagccagactatgacttagagacctttgtgaacaaagcagaatctgccctgactcagcagactaagcacttctcagccctgcgagaagtcatcaaggccctgcgtgtggccatgcaactggaagaacaggctagcaaacagatgaacagcaagaaacggcaccaatgatgacttcaataaagatctgtttatgtcacaccagcctcttcccctatccagcaaactttgggcaccttctggctttggttagggactgagttggatgggttttggtaaatgccaggtaaggggcatcaggcccaggaagactcggagagagaattgctgttctcttgcttagtttggagcaggaggaaggagcttttcatgactgcttccccttttcctccctatcagagggggtgctgtttgggtagtctccctgcggcagcaccctgcccctctgcaacagctgctgatagacaacctgcaaggtccaggctctgggagagaaattggtcctcgtccagcttctactgcctttggtctgtggtatcacccttgctctgagcactcttgtgtcagaaaaaaaaaagtttttgagacctctgttttagttttagaaatccaagatttccatttcctgctgtatgtatttttatgttgtacctaacaataaagaaaga

SEQ ID NO: 7076 - DNA, 579 bp, Cricetulus griseus
  misc_feature (77)..(103): n is a, c, g, or t
  misc_feature (223)..(240): n is a, c, g, or t
  misc_feature (328)..(361): n is a, c, g, or t
ggcaagaaattcaagggccctgagtttgtgcgcaagcacatcttcaataagcacgcggagaagatcgaggaggtgannnnnnnnnnnnnnnnnnnnnnnnnnntcctcacggatgccaagcgcccagcattgcccgagatgaagccagctcagccacctggccctgcccagatactccccccaggcctgaccccaggacttccctacccacaccagacgccannnnnnnnnnnnnnnnnnggccagcccgcccttcccatctttgggctatggagctggtgctgtccgccctgcaggtcccaacaggagggcctccatatccccatgnnnnnnnnnnnnnnnnnnnnnnnnnnnnnnnnnnttttcgaggccaaggaggatatcctgggaaacctcggaacaggatggttcgaggagacccgcgggccatagtggagtatcgggacctggacgccccagatgatgttgatttcttttgagacatctgccgccctcactctacatctgctgccctctatccccgggaccacttaccccatgagctgacaggttttttgtacgttatttttcctgctagtt

SEQ ID NO: 7077 - DNA, 600 bp, Cricetulus griseus
  misc_feature (560)..(574): n is a, c, g, or t
ttgtaaataaagccaagagcatatcttaatgcctgtggtgtacctgggtgagaacagagggtagaaggagtctcgagctccctgtgacttgcgtgtggtagaaatatctgtcatgtgtttaacgggatgactttggagcatgtggagtcatagctgtgtgttgctagagggacacaggcctttctttcccctttcatcccagatggaccgtgaccatttgggactttctccttttgtagtcaccacgtgtgtgtctggtaaataggtattctgttttggtctcacagcaccattacaagtctgtcactctgaaataacctaatgccaattaacagtgcatgctttgggagttgggaaggcagcttcctctggggagtgtatttgctgacattgagttttccatcagtcctcaatgagaaatggatggcgtgtttgccaaaccctgttcacagcactcaggggagggtgccagcaaggtggagaccggcctcacattgctgttctgattcctacttcagtgctttggaagccggagaggccaacctcaagggtattttttnnnnnnnnnnnnnnnataaatcagcacagcctgctctctgg

SEQ ID NO: 7078 - DNA, 1371 bp, Cricetulus griseus
  misc_feature (399)..(414): n is a, c, g, or t
  misc_feature (546)..(563): n is a, c, g, or t
ggttgcaaggcatggtgacagaaacatcgatgaaatggcagaaggaatgtgaacggtcggtggcagccacccagctggagatgcagaataaactgtgggtcaaagatgaaaagctcaaacagttgagggccattgtgactgaaccaaaacctgagaagccagagagaccctcccgagaaagggaccaggaaaaaatcattcagagatcggtctctccttcgcctgtgcctctttctagtaacaatattgctcagatttccaacggccagcaactcatgagccaaccacagctacacaggcgctctaactcttgcagcagcatttctgtagcttcctgtatttcggaatgggagcagaaactatctccgttcagcacacctgtcaatgtcacctctcttnnnnnnnnnnnnnnnnaggagccaggacaaagtaaaacatgtatcgtgtcagacagaaggcgagggatgtactggactgaaggcagggagatggtccctacattcagcagtgagataggcgtagaagaggaccattgccacaggaacnnnnnnnnnnnnnnnnnncacagaaggtcccgctctgcagggagcagatgggtagatcataagcctgcctctaatgtgcaaactgagacagtcatgcagccacatgtccctcatgccatcacagtatctgttgcaaatgaaaaggcgctagctaagtgtgagaagtacatgctgacccaccaggaactagcctccgatggggagattcagactaaagtaattaagggtgatgtttataagaccagaggtggtggacaatctgttcagtttactgatattgagactttaaaacaagaatcgccgactggtagtcgaaaacgaagatcatccacagtagcacctgcccaaccagatggtacagagtctgaatggaccgatgtagaaacaaggtgttcagttgctgttgagatgagagcaggatctcaactgggacccggatatgagcatcatgcacaacctaagcgaaagaagccttgacctgatagccctggtggccgaagaatgtttttgtttgtgttggtgatttctccaaagctgtgccagacgcagtatctgaatcatcctacagaagaatgtatctggatcacattgtattttttattgtgacttttccaactgttctgaatattttctaaggttttataaaaaaaaaaaatgctgctattgattagccgcaaaaaatgcactttagacatatttaagaatttaaagatggtgagtgggcaatggtaaaaccattttaggaagatgtttagaattctgtatgtatatattcactttctgcttttatatatgccaaaagaattgaaataaaaagcactaaaaa

SEQ ID NO: 7079 - DNA, 1373 bp, Cricetulus griseus
aacgaatcggaggtggtgtgtctgcggcagaagaccgcagcccaggtgaccttactggctgagcaaggtgaccggctccacgggctagagatggagcgccgccgactccacaaccagttgcaggaacttaagggcaatatccgggtattctgccgggtgcgccctgttcttgcaggggaacctactccatcgcctggctttctcctgtttccccatggccctgctggaccctctgaccccccaacccgccttagcctttcacggtctgatgatcggcgttcgaccctgaccagggcgcctgcacccactacgcgccacgatttctcctttgaccgggtgttcccaccaggaagcaaacaggaggaagtgtttgaggagatttccatgctggtccagtcggcactggacggctaccctgtgtgcatctttgcctacggacagaccggcagtggcaagaccttcactatggagggcaggcctgggggagacccccagttggaggggctgatccctcggcgcatgcggcatctcttctctgtggctcaggagatgagtggccagggctggacctacagttttgtggcaagttacgtagagatctacaatgagaccgtccgagacctgctggccactgggacccggaaggggcaaggcgagtgtgagattcgtcgagcaagaccaggcagtgaggagcttactgtcaccaatgcacgctatgttcctgtttcctgtgagagagaggtggaggctctgctccatttggcccaccagaatcgagctgtggcccgcactgcccagaatgagagatcatctcgaagtcacagtgtgttccagctgcagatttctggagagcatgctgctcggggcctgcagtgtgtcgctccccttaaccttgtggacctggctgggagtgagcggctagaccctggtttaaccttaggccctggggaacgtgatcgccttcgggaaacacagtccattaatagcagtctgtctaccctgggactggtcataatggccctgagcaataaggagtcccacgtgccttaccgaaacagcaagcttacctacctgctgcagaactcgctgggtggcagtgccaagatgctcatgtttgtgaacatttcccctctggaagagaatgtctctgagtctctcaattcactacgttttgcttccaaggtgaaccagtgtgttatcggtactgctcaggctaataagaagtgaagatggccagagcctggttccgctgccgctgggttgattgtgtctctctctgtgtgtactgggggggagaggggggtgagagatacgcttttattgggtggacatcatttgtacccaactatcaaataaagaaattttgttgtaga

SEQ ID NO: 7080 - DNA, 1400 bp, Cricetulus griseus
  misc_feature (209)..(225): n is a, c, g, or t
  misc_feature (227)..(244): n is a, c, g, or t
aggctgtgtaagatttgtttttaaactgtacagtgtcttttttttgtgtgttaacacactaccgatgtgtcttggatggtcctgtcctggtggtattttcaatgaccactaacctgcctggtacagtctgggggttgtaaattggcatggaaatttaaaggcaggttcttgtttacacagcacaaattagttatatatggggacggtannnnnnnnnnnnnnnnncnnnnnnnnnnnnnnnnnnggttttttttttccatcttcagttgtctttgatgcagcttatacgaaaataattgttctgttaactgaataccactctgtaattgcaaaaaaaaaattgcagctgttttgttgacattctgaatgcttctaagtaaatacaatttttttttattagtattgttgtccttttcataggtctgaaatttttcttctcaaggggaagctagtcctttgcttttgcccattttgggtcacatgaattattgcagtgtttcttttcgtatagttagctggagaaaagcttttatctacacaccctgcatattgtgatgggtaacattttcatccatagttgaaagcccaaaattgtgattagttggataagagatagtacataaaccatgtgcaaaactgagagtgatcaattctatcacaccatggaataagaatcgaacaatctgaaagtctgccttgaaggactagtagaaaattgtgttctaatccttacgtgaggactcttcttaacgtcattactgtgtaatggcagttacattctgcagttccctattaaagacctgagaatgtatccctcaaaagcgtgagctaaaatacaagactgccatattaaactttgtgacattggtcctagcgaaggctatgataagaacgctggctgtaatgcctttgcccatctatctaaatacaggattgctcaggaaacttgactgtttaaaaaaaaagtatttttaattagttgagccagcttttcttaaaattatgccacatataaaattaagggtatattttcctacattgtgatttgtcccttataaatcagatacaaggaaagatgataaactttgcatattagtaccagttgtccaatccatttggtttttctttataaaacccaaactcattagtcatgtttaatctgcttagcagttagggaacaatttggcaattttgtgttttttttttgagattatcattctcttaaagtgccagtgtttttaaaatagcgttctgtaattttacacgctttgtgatggagtgctgtttgttatataattttgacatgggttctttacattgcgtttgtttatgtaatttgaggaggaatactgaacatgagtcctggatgatactaataaactaataattgcagaggtttt

SEQ ID NO: 7081 - DNA, 900 bp, Cricetulus griseus; identical to SEQ ID NO: 3439
  misc_feature (127)..(155): n is a, c, g, or t

SEQ ID NO: 7082 - DNA, 600 bp, Cricetulus griseus
  misc_feature (408)..(408): n is a, c, g, or t
  misc_feature (492)..(506): n is a, c, g, or t
acttcttcgacagaggctactgtgaagttactactccaacactggtgcagacgcaggtggaaggtggggccacactcttcaagcttgactattttggagaagaagcgtttttaacccagtcctcgcagctgtacctggagacctgccttccggccctgggggatgttttctgtattgcccaktcatacagggctgaacagtccagaacacgaaggcacctggctgaattcactcatgtggaagctgagtgtcccttcctgacctttgaggacctcctgaaccgtttagaggacctagtgtgtgatgtggtggacagagtcttgaagtcaccagtggcaagcatagtgtatgacctcaacccgaactttaaaccccctaaacggcctttcaggcggatgaactattcanaagctatcgagtggctgagggagcacgatgtaaagaaagaagacgggacactctatgaatttggagatgatattcccgaagctnnnnnnnnnnnnnnnacagacaccattaatgaaccaatcctgctgtgtcgggttcctgtggagatcaagtccttctatatgcagcgatgtgcctgagatcctcgactta

SEQ ID NO: 7083 - DNA, 580 bp, Cricetulus griseus; identical to SEQ ID NO: 3441
  misc_feature (247)..(262): n is a, c, g, or t
  misc_feature (426)..(518): n is a, c, g, or t

SEQ ID NO: 7084 - DNA, 554 bp, Cricetulus griseus; identical to SEQ ID NO: 3442
  misc_feature (508)..(508): n is a, c, g, or t

SEQ ID NO: 7085 - DNA, 600 bp, Cricetulus griseus
cctggctgacggctggcaggaagcakggcgtcgggatgagtgcaggctcggaccccgtggttatcgtctctgcggcgcggaccgccatargctccttywwtggtgccctgtctactgtgcctgkcsacgacctcgggacaactgtcatcaaagaagtcctgcakagggccaaggtggccccasaagadgtgtccgakgtcatattwggacacgttttgacggcaggttgtgggcagaatcctactcgacaggccagtgtgggtgcakggatcccctactcagttccagcatggakctgccakatgatctgyggctcawgcctcaaggccgtgtgtcttgcagcccagtccatagccataggtgactccakcattgtggtggcaggaggcatggagaacatgagcaaggcccctcactyggctcacctgakagcakgagtcaagatgggtgakatgccgctagctgacagcatactgtgtgatggtcttacagatgcgtttcacaactatcatatgggcatcacagctgagaatgtggccaaaaaatggcaagtgagtagagaagcccaggacaaggttgccgttgtgtcacaaatcaggg

SEQ ID NO: 7086 - DNA, 600 bp, Cricetulus griseus
  misc_feature (386)..(415): n is a, c, g, or t
gatgtgtttgcctgctttgccacccctgcagtctcgtggcgcctcctgtctgtggagcatgaagactttttaacagttgcagattcactgaagaaagaatttgatagtccagaaactgctgatctgaggtttcgaattgatgggaaatatattcatgtccataaagctgttttgaaaatcaggtgtgagcacttccgatccatgttccagtcctactggaatgaggacatgaaggaggtgatagagatagaccagttttcttaccccgtgtaccgtgcctttctccagtacctctacacagacacagtggatctgccacccgaggatgccataggtctcttggacttggcgacatcgtactgtgaaaacagactgaagaggctttnnnnnnnnnnnnnnnnnnnnnnnnnnnnnntggaaaacgctttctcattattctctgctgcagtcagatatgatgcagaggatttagaagaattctgctttaagttttgcatcaatcatttgacagaagttacacagactacggcattttggcaaatggatggccccctgctaaaggagttcattgctaaagccagtaaatgtggagcctttaag

SEQ ID NO: 7087 - DNA, 600 bp, Cricetulus griseus
gaaagagcacatggatgccataaatcatgacaccaaagagctggagaagatgaccaaccgacagggcatgctgctgaagaagaaggaagagtgcatgaagaaaatccgggagttggggtcccttcctcaggaagcctttgaaaagtaccagacactgagcctgaagcagttgtttcgaaaacttgagcagtgcaacacagaattgaagaagtacagtcacgttaacaaaaaagctttagatcagtttgtgaatttctctgagcagaaagaaaagttgataaagcgacaagaggaactggataggggctacaaatcaatcatggaattaatgaacgtgcttgaacttcgaaaatatgaagctattcagttaactttcaaacaggtatctaagaacttcagtgaagtattccagaagttagtacctggtggcaaaacaactttggtgatgaagaaaggagatgtggagggcagccagtctcaagatgaaggagaagggagtggcgaaagtgagaggggctctgggtcacagagcagtgtcccatcagttgaccagttcacaggagttggaatcagggtgtcatctacaggaaagcaaggtga

SEQ ID NO: 7088 - DNA, 600 bp, Cricetulus griseus
aacagcataatagagcacatgcctcctgagtcagttgaccaatacaggaagcagatcttcattctactgttccaaagactgcagaactccaagaccaccaagtttatcaagagtttcttagtgtttattaatttatattgcattaagtatggggcattagcattacaagaaatatttgatggcatacaaccaaagatgtttggaatggttttggaaaaaatcattattccagagattcaaaaggtatctggaaatgtggagaaaaaaatttgtgcagttggcataaccaaattactcaccgaatgtccaccaatgatggacacagagtacaccaagctatggactcctttgttacaatctctcatcggcctttttgagttgccggaggacgacaccattcctgatgaagagcattttattgacatagaagatacaccagggtaccagactgccttctcacagctagcatttgctggcaaaaaggaacatgatcctgtagggcagatggtgaataacccgaaaatccatctggcacagtcacttcacaaactgtctactgcctgtccggggagggttccctcaatggtgagcaccagcctc

SEQ ID NO: 7089 - DNA, 561 bp, Cricetulus griseus; identical to SEQ ID NO: 3447
  misc_feature (282)..(299): n is a, c, g, or t
  misc_feature (423)..(469): n is a, c, g, or t

SEQ ID NO: 7090 - DNA, 526 bp, Cricetulus griseus; identical to SEQ ID NO: 3448

SEQ ID NO: 7091 - DNA, 596 bp, Cricetulus griseus; identical to SEQ ID NO: 3449
  misc_feature (263)..(278): n is a, c, g, or t

SEQ ID NO: 7092 - DNA, 565 bp, Cricetulus griseus
  misc_feature (61)..(61): n is a, c, g, or t
  misc_feature (147)..(161): n is a, c, g, or t
  misc_feature (457)..(457): n is a, c, g, or t
  misc_feature (465)..(465): n is a, c, g, or t
  misc_feature (500)..(500): n is a, c, g, or t
gcggcggtagcgggtggcttgtggtgcagctttaccacagaaggaaccgcgcaggccttantgtgagtggtcactgtagatcccgggaacctggtggccttagtccttcaggtggatcagcgtgcgacatgggaaagaaaaccaagnnnnnnnnnnnnnnntcttcttccgaggatgaggaggagtatgtggtggaaaaggtgttagacagacgcatggttaaggggcaagtggagtatctgttgaagtggaaaggcttttctgaggagcacaatacttgggaacctgagaagaacttggattgtcctgaactaatttctgagtttatgaaaaagtataagaagatgaaggagggtgaaaacaacaagcccagggagaagtcagaaggaaacaagaggaaatccagtttctctaatagtgctgatgatataaaatctaaaaaaaagagagagcagancaatgatntcgctcgaggctttgagagaggactggaaccaganaagatcatttggggcaacagattcctgtggtgacttaatgtttcttaatgaaatggaaagacaca

SEQ ID NO: 7093 - DNA, 755 bp, Cricetulus sp.; identical to SEQ ID NO: 3451

SEQ ID NO: 7094 - DNA, 1400 bp, Mesocricetus auratus
gcctcctgccccagatcctggagaatctgctgagtgcccggaagagggccaaggctgagctggctcaggagacagaccccttgcggcggcaggtcttggatggacggcagctagcactgaaagtgagtgccaactctgtgtatggcttcactggtgccgaggtgggcaagctgccatgtttggagatctctcagagtgtcactgggttcgggcggcagatgattgagaaaaccaagcaactagtggagtccaagtacaccctggaaaatggctacaatgccaatgccaaggtggtctatggtgacactgactctgtgatgtgccgatttggtgtctcctctgtggctgaggcaatgtctctgggtcgagaggctgcaaaytgggtatctagtcacttcccatcacccatccgactggagtttgagaaggtttacttcccatacctgctcatcagcaagaagcgctatgctggcctgctcttctcctcccagcctgatacccatgacagaatggactgcaagggcctggaggctgtgcgcagggacaactgtcccctggtggccaaccttgttacatcctctctgcgacgaatccttgtggaccgggatcccgatggggcagtggcccatgcaaaggatgtgatctcagacctgctgtgtaaccgcatagacatctcccagctggtcatcaccaaggagctgacccgagcagccgcagactatgctggcaagcaggctcatgtggaactggctgagaggatgaggaagcgtgaccccggcagtgcgcccagcttgggtgaccgcgtcccctatgtgatcatcggtgctgccaaaggcgtggctgcctacatgaagtcggaggaccccctgtttgtgctggaacacagcctgcccatcgacactcaatactacctggggcagcagctggccaagccactgctgcgaatttttgagcccattctgggtgagggccgtgcagagtctgtgctgctccgaggagaccacacacgctgcaaaaccgtgctcaccagcaaggttggtggcctcctagccttcaccaagcgccgcaactgttgcattggctgccgctcagtgatcaaccatcagggagctgtgtgtgaattctgtcagccccgggagtcrgagctctatcagaaggaggtgtcacacctgaatgccttggaggaacgcttctcgcgcctctggacacagtgccagcgttgccagggcagcttgcatgaggacgtcatctgcaccagccgcgactgtcccatcttctacatgcgcaaaaaagtgcgcaaggacctggaggaccaggagcggctgctgcagcgttttggacctccgggcccmgaggcctggtgactcgacgagggacacggaataaagttcagacttttt

SEQ ID NO: 7095 - DNA, 1400 bp, Cricetinae gen. sp.
  misc_feature (845)..(863): n is a, c, g, or t
aaattttatatacgccagaaaaatgagtaaaagagactgcttagctgsttcaaaacagcagtaatagattaaatggtcaaggctggggatacgctcagtggtaccatgattgccttgtaggcatgaggtcatgggttgttgattccctagtccttaaaataattatagcwrtrayrgwtaacaggtaggtccaagggagagtacgtggtatctaatcatcccttatgcttcargacccacttcataaccagaactctggatgctcaagtcttgtacaagattgtrtttgacctatgcacatctttcatgctggattgcttgtagcactgaacacagwgtaaatgctaacataaatgattattatactgtgctttgtggtaagtaaaagtkcatattcagtacagatcaaatattaatatgcagktggtttgaacctttgggtgccttggcccacagatktgaaagggcagktctatatgctaatttttgtcatttttcgttgattttgtgctttaaccattctaagatgttttactacttaactgttacttttagtggtaatggtaactggttaactcttttaaatagttatttaccacttagcaaaatctgttcataattatagtggaagagatgttagtcataaggtgagagtgagttgggaagttacaagagttgggaaaacttttagcactaccagtcctgggcctggataatcttgtagggtctgacctgggttggatgtttaagtagaatctctgcaccctgtacactcagtatcatttagcgcccctttgctaagacaaccaccaccaaaaaatggggggtgggttgggttttgaggnnnnnnnnnnnnnnnnnnncctggctcttcttgaactcactctgtagactagtctagccctggaactcaggatctacctgcttctgtcttccaagtgctaggattaaaggaacggactaccatacccagcaataaccagaattttaatgcatgataccaagtgtccaataggggcagagatacctctagttgagaaccactcactgttctgtagtcagggcttactttagaggtggaaacacaagggaatagcagtgagaaagtttaggatgagtgtgatgaataggcatatattataaggagattttgatgttatagattaggcatatattgagattgtgtcttgattgatgaactttttaaaacttgctacaggtgtgtcaaatttgagatcttaagacagctttagacttaaatgctgtgtaatgaataattttttcttataaaaattttgtaaattttgttaatttcttgataactcaaaagtttatttatttatcttcgaagatacaactatgtagcaagtatttattgaaaattaaaaataaactatttt

SEQ ID NO: 7096 - DNA, 600 bp, Cricetulus griseus
  misc_feature (31)..(48): n is a, c, g, or t
  misc_feature (484)..(484): n is a, c, g, or t
tacgaactcaagcatgcgtcacatatcagcnnnnnnnnnnnnnnnnnncacagtgtcaaaggcttgggcaaaacgacccctgacccttcggccagcatcaccctggagggtgtasaggttccactggggacagggatcccatcgggtgttaatgacacctgcctactatataacgagtacatcgtctatgacattgctcargtgaacctgaaatacctgctgaaactgaagtttaattttaagacatccctgtggtgaagtgygaggggtgtgctgcacccakcacccaagcctakgggtaaacttccccctggtgcctccacaccacagacaccacaaaacctcagccacaccgctgcctaatggtggcaccctcacccgatctccttagggttctatatagacaggttaaagggctctgggttcaagtcccttgtccgtgttgcactcggtgggagggttgttaggggttttatcctaccangcatagccctgatagacacggctgacagtagarggaaagttggggagargtttttgttttgtttgcctagactagtcttgagggggaaaagccacgtcacagccacaatgtctgcc

SEQ ID NO: 7097 - DNA, 600 bp, Cricetulus griseus
ataatgccgatactttagcactcgtatttgaagcaccaaatcaagagaaagtttcagactatgaaatgaagttaatggacttggatgttgagcaacttggaatccctgaacaggagtacagctgtgtggtaaagatgccttctggtgaatttgcgcgcatatgccgagaccttagccatattggagatgctgttgtaatatcctgtgcaaaggatggggtgaagttttctgcaagtggagagcttggaaatggaaacattaagttgtcacaaacaagtaatgttgataaagaggaggaagctgtaaccatagaaatgaatgagccagttcagctaacttttgcactaaggtacctgaactttttcacaaaagctactccactgtctcctacagtaacactcagtatgtctacagatgtaccccttgttgtagagtataaaatttctgacatgggacacttaaagtattatttggctcccaagattgaagatgaagaaggatcttaggcgttgctagaatctgagaaaaccaagcctttgagaactgcttctgagatgccagcatgttttgaagtcttttctgtcaccaagtttgtacctg

SEQ ID NO: 7098 - DNA, 451 bp, Cricetulus sp.
  misc_feature (30)..(63): n is a, c, g, or t
ggctcaacaaatctgctaggkctamtaccnnnnnnnnnnnnnnnnnnnnnnnnnnnnnnnnnnaacctargaatagctatcccacyatgagctggagctgtaatcttadggtttcgacataaaataaaagactcacttgctcactktctyccacaargaacccctattscacttatcccaatactagtaattattgaaacaawtagctkatttattcaacctatagccttagctgtacgtttaacagctaatatcaccgcaggacatctgctaatgcacttaattggaggagctacactagtcctaacctcaatcagcctaccaactgctataatcacmwttattatcttaattatattaactatcctagagttcgctgtagccttaattcaagcctatgtatttacactactagtaagcctatatctacatgataatacgtaatgaccca

SEQ ID NO: 7099 - DNA, 600 bp, Cricetulus griseus
  misc_feature (199)..(214): n is a, c, g, or t
gctgtaacatgccagcttcccattgatcgtggtggaggtgaaggaaaggccatgtacattgacaccgagggtacgtttaggccagaacggctgctagcagtggctgagaggtatggtctgtctggcagcgatgtcctagataatgtagcatatgctcgagggttcaacacagaccaccaaacccagctcctttatcaannnnnnnnnnnnnnnntagaatccagatatgcactgcttattgtagacagtgctactgccctctacagaacagactactcaggtcgaggagagctttcagccaggcaaatgcatttgkmcwsakktctgaggawgctkctsmgmcwkgcwratgmrtttggwgtwkcwgwggwwrtcaccaaccaggtagtagcccaagtggatggagcagccatgttcactgcagatcccaaaaaacccattggaggaaacatcattgcccatgcatcaacaaccaggctgtacctgaggaaaggaagaggggagaccagaatctgcaaagtctatgactctccctgtctccctgaagctgaagccatgtttgccattaatgcagatggagtaggagatgccaaggactga

SEQ ID NO: 7100 - DNA, 1400 bp, Cricetulus griseus
ccacgagcgctcctccgarrgcgatrgtttggctcctcctcagcatcttatccgagtggaaggaaatwtgcatgccgartacctggatgacaagcaramwtttcggcacagtgtggtggtrccmtatgagccacctgaggttggctctgactgtaccaccatccaytayaactacatgtgyaatagttcctgcatggggggcatgaaccggcggccyatcctyaccatcatcacrctggargaccccagtggkaacctgctgggacggaacagctttgaggttcgtatttgtgcctgycctgggagagaccgtcgtacmgaggrmraaaatttccaraaraarggagaaccttgcccagarctrcccccaaagagtgctaaacgagcattgcctaccaacacaagctcctctccccmgccaaagaraaaaacacttgayggagaatatttcacccttaagatccgwggtsawgarcgcttcaagatgttycaagarytgaatgaggccttggaaytgaaggatgcwcaggcttyraaggsgtcagaggacartggtgctcactccagctacctgaagtccaagaagggccagtctgcctcccgtcttaaaaaactaatgatcaagagagaggggcctgactcggactgacytccttcctmkgcctcctgtsccccaycagcaacytcccawcccccwcctccttycctgmcattttgtcacttgggtgcttgaaccccrgcytgggtrgatctgtcatctctgwtatctggggagggtggtgggatacaccarkacaccakctyagcttttargattctgrccatgaggaaaggaagaaaattctcaataggtggkgtkrgaatttacaaytggccatgtgcarkgtgaggccccacccaaytctctaagaaagccatctgagtttactttctcctgacttgaaagccacatctrtaaaatgcagatgrgcatacctgcttctcagggtttsttgtgatacttgtgatacttgtcccttccrcaccwtttattaccttgtggcctggactcwgycccctctgtgagtsctggttcctggcccctrttgggkgrtrggttrsyagstsycwgststctgctggcccagcgaaatcctatccagccacttgwtggaccctggcacctaaaatgaaatttcaccccrccckaywcsctgtaagattctatcttgggctctcatrgggtccatawccaccaagacccattttctttccaccctgcactcrggatcagtttctttgaactctgcccagcctttctarcctttctgcatttaccrtccccccctctctttttataccatryccccttttatataccrattwcttattttacaataaaattttgttatcacytgtwa

SEQ ID NO: 7101 - DNA, 302 bp, Cricetulus griseus; identical to SEQ ID NO: 3459

SEQ ID NO: 7102 - DNA, 578 bp, Cricetulus griseus; identical to SEQ ID NO: 3460
  misc_feature (414)..(456): n is a, c, g, or t

SEQ ID NO: 7103 - DNA, 174 bp, Cricetulus griseus; identical to SEQ ID NO: 3461
  misc_feature (134)..(134): n is a, c, g, or t

SEQ ID NO: 7104 - DNA, 579 bp, Cricetulus griseus; identical to SEQ ID NO: 3462

SEQ ID NO: 7105 - DNA, 579 bp, Cricetulus griseus; identical to SEQ ID NO: 3463

SEQ ID NO: 7106 - DNA, 579 bp, Cricetulus griseus; identical to SEQ ID NO: 3464

SEQ ID NO: 7107 - DNA, 503 bp, Cricetulus griseus; identical to SEQ ID NO: 3465

SEQ ID NO: 7108 - DNA, 493 bp, Cricetulus griseus; identical to SEQ ID NO: 3466

SEQ ID NO: 7109 - DNA, 581 bp, Cricetulus griseus; identical to SEQ ID NO: 3467
  misc_feature (120)..(142): n is a, c, g, or t

SEQ ID NO: 7110 - DNA, 221 bp, Cricetulus griseus
ccagcgaccagtatgaagcactggcaaggtaacagcggtccttgcagaaacccgatgtcctgaccaccggtaggcgggtaacccaatagggagcataaacttaatatcatgactgctgggtcccgaggtaccccttctggttcaggatgtggttttcactgatgagatggcacattttgacagagtagcgaattcccgagagagtggtacatgcaaaagga

SEQ ID NO: 7111 - DNA, 579 bp, Cricetulus griseus; identical to SEQ ID NO: 3469

SEQ ID NO: 7112 - DNA, 497 bp, Cricetulus griseus; identical to SEQ ID NO: 3470
  misc_feature (39)..(51): n is a, c, g, or t
  misc_feature (53)..(77): n is a, c, g, or t

SEQ ID NO: 7113 - DNA, 466 bp, Cricetulus griseus
  misc_feature (325)..(325): n is a, c, g, or t
ttatacgctcaaattaacaacacatcccttgcggagttggaaaagcggttaaaagagacaccgtttgaccctcctaaagttgaaagtgcagaaagctttccaagctatgacacagcttctgagcagctgcatgaggcagggtatgatgcttacatcacaggactctgcttcatctccatggcaaattacctaagttctttactcggacctccaaaagtgtgtgtgtctgccagatcaaaactcattgaacccttttttaacaagttatttcttatgagggtcatggacattccatatttaaacttggaagggccagagcttacancctaaacgtgatcatgttctccacgtgacattccccaaagaatggaaaaccagggacctttaccagctcttcagcgcctttggtaacatccaaatatcctggattgatgacacatcaccctttgtttctctcagccagcca

SEQ ID NO: 7114 - DNA, 580 bp, Cricetulus griseus; identical to SEQ ID NO: 3472

SEQ ID NO: 7115 - DNA, 577 bp, Cricetulus griseus; identical to SEQ ID NO: 3473

SEQ ID NO: 7116 - DNA, 579 bp, Cricetulus griseus; identical to SEQ ID NO: 3474
  misc_feature (408)..(444): n is a, c, g, or t
  misc_feature (482)..(515): n is a, c, g, or t

SEQ ID NO: 7117 - DNA, 224 bp, Cricetulus griseus; identical to SEQ ID NO: 3475

SEQ ID NO: 7118 - DNA, 581 bp, Cricetulus griseus; identical to SEQ ID NO: 3476
  misc_feature (309)..(309): n is a, c, g, or t
  misc_feature (448)..(448): n is a, c, g, or t
  misc_feature (508)..(508): n is a, c, g, or t
  misc_feature (524)..(524): n is a, c, g, or t

SEQ ID NO: 7119 - DNA, 334 bp, Cricetulus griseus; identical to SEQ ID NO: 3477

SEQ ID NO: 7120 - DNA, 600 bp, Cricetulus griseus; identical to SEQ ID NO: 3478
  misc_feature (27)..(65): n is a, c, g, or t
  misc_feature (403)..(419): n is a, c, g, or t

SEQ ID NO: 7121 - DNA, 494 bp, Cricetulus griseus; identical to SEQ ID NO: 3479
  misc_feature (373)..(393): n is a, c, g, or t

SEQ ID NO: 7122 - DNA, 540 bp, Cricetulus griseus
tattgaaactgctagctttattgacgtggatgatgaaagatggcactactttctagtatttgagaagtataataaggatggagctacgctctttgcgaccgtagggtgcgtgacagtctataattactatgtgtacccagacaaaacccggccacgtgtaagtcagatgctgatactgactccatttcaaggtcagggccatggtgctcaacttcttgaaacagttcatagatactacattgcatctccttcagttcttgatataacagctgaagatccatccaaaagctatgtaaaactaagagactttgtgcttgtgaagctttgtcaagatttgccctgtttctcccgggaaagattaatgcaaggattcaatgaagatatggcaatacaagcacaacagaagttcaaaataaataagcaacatgctagacgtgtttatgaaattcttcgactgctggtaactgacatgagtgatgctgaacaatacagaagctacagactggacattaaaagaagactaattagcccttataagaa

SEQ ID NO: 7123 - DNA, 578 bp, Cricetulus griseus; identical to SEQ ID NO: 3481
  misc_feature (546)..(546): n is a, c, g, or t

SEQ ID NO: 7124 - DNA, 327 bp, Cricetulus griseus; identical to SEQ ID NO: 3482
  misc_feature (97)..(138): n is a, c, g, or t

SEQ ID NO: 7125 - DNA, 581 bp, Cricetulus griseus; identical to SEQ ID NO: 3483

SEQ ID NO: 7126 - DNA, 576 bp, Cricetulus griseus
  misc_feature (377)..(377): n is a, c, g, or t
tgattatgaagttattcctaacagtaacttctatgtatctagaacagcctacagagataacacttctgtctattatataagtgggaagaagaggacatttaaagatgttggaaatcttcttagaagccatggaattgacttggaccataatcgatttttaatattgcagggtgaagtcgaacagattgctatgatgaaaccaaaaggccagactgaacatgatgagggtatgcttgagtatttagaagatataattggctgtggacggctaaatgaacctattaaagtcttatgtcggagagttgaactattaaatgaaaacagaggagaaaagttaaacagagttaaaatggtggaaaaggaaaaggatgccctanaaggagagaaaaacatagccattgagttccttaccctggaaaatgaaatatttaaaaaaaagaatcatgtctgtcaatattacatttatgatctacaaaaaagaattgctgaaatgaaaactcaaaaggaaaaaattcatgaagatactaaagaaatcactgagaagagcaatatgctttcaaatgaaatgaaagctaa

SEQ ID NO: 7127 - DNA, 575 bp, Cricetulus griseus
  misc_feature (537)..(537): n is a, c, g, or t
gaaatgtgtccctaaagtgcctcactgagattgctggtgtgagtgtaagccaatacgaggaacaatttgaaactctgtttacacttacaatgatgcagctaaagcagatgcttcctttaaatactaatattcgagttgcatactcaaatggaaaagatgatgaacagaactttattcaaaatctcagtctatttctctgcacctttctaaaggaacatggtcaacttttagaaaaaagactgaatctcaaggaagcactcatggaggctcttcattatatgttgttggtgtctgaggtcgaagaaactgaaatttttaaaatctgtcttgagtactggaatcatttggcagccgagctctatagagagagtccattttctacatctgcttctccattgttatctggaagtcagcattttgatattcctccaaggagacagctgtacctaactgtgttatcaaaggtccgtttattgatggttagtcgcatggctaaaccagaggaggtactggttgtagaaaatgatcagggagaangtgtaagagagttcatgaaggataccgattccataaat

SEQ ID NO: 7128 - DNA, 555 bp, Cricetulus griseus; identical to SEQ ID NO: 3486

SEQ ID NO: 7129 - DNA, 533 bp, Cricetulus griseus; identical to SEQ ID NO: 3487
  misc_feature (454)..(479): n is a, c, g, or t

SEQ ID NO: 7130 - DNA, 579 bp, Cricetulus griseus; identical to SEQ ID NO: 3488

SEQ ID NO: 7131 - DNA, 507 bp, Cricetulus griseus; identical to SEQ ID NO: 3489

SEQ ID NO: 7132 - DNA, 478 bp, Cricetulus griseus; identical to SEQ ID NO: 3490
  misc_feature (320)..(334): n is a, c, g, or t

SEQ ID NO: 7133 - DNA, 484 bp, Cricetulus griseus; identical to SEQ ID NO: 3491

SEQ ID NO: 7134 - DNA, 523 bp, Cricetulus griseus; identical to SEQ ID NO: 3492

SEQ ID NO: 7135 - DNA, 528 bp, Cricetulus griseus; identical to SEQ ID NO: 3493

SEQ ID NO: 7136 - DNA, 561 bp, Cricetulus griseus; identical to SEQ ID NO: 3494

SEQ ID NO: 7137 - DNA, 350 bp, Cricetulus griseus; identical to SEQ ID NO: 3495

SEQ ID NO: 7138 - DNA, 578 bp, Cricetulus griseus; identical to SEQ ID NO: 3496

SEQ ID NO: 7139 - DNA, 561 bp, Cricetulus griseus; identical to SEQ ID NO: 3497
  misc_feature (506)..(506): n is a, c, g, or t

SEQ ID NO: 7140 - DNA, 402 bp, Cricetulus griseus; identical to SEQ ID NO: 3498

SEQ ID NO: 7141 - DNA, 579 bp, Cricetulus griseus; identical to SEQ ID NO: 3499
  misc_feature (143)..(211): n is a, c, g, or t

SEQ ID NO: 7142 - DNA, 382 bp, Cricetulus griseus; identical to SEQ ID NO: 3500

SEQ ID NO: 7143 - DNA, 537 bp, Cricetulus griseus; identical to SEQ ID NO: 3501

SEQ ID NO: 7144 - DNA, 502 bp, Cricetulus griseus; identical to SEQ ID NO: 3502

SEQ ID NO: 7145 - DNA, 168 bp, Cricetulus griseus; identical to SEQ ID NO: 3503
  misc_feature (93)..(108): n is a, c, g, or t

SEQ ID NO: 7146 - DNA, 519 bp, Cricetulus griseus; identical to SEQ ID NO: 3504

SEQ ID NO: 7147 - DNA, 524 bp, Cricetulus griseus; identical to SEQ ID NO: 3505

SEQ ID NO: 7148 - DNA, 579 bp, Cricetulus griseus; identical to SEQ ID NO: 3506

SEQ ID NO: 7149 - DNA, 467 bp, Cricetulus griseus
atcagatatcagctttgacaagactgatgaatcactggagccaagaactgagacagacaattcaggcacacctcacaataatggaggcatgcgcctacatgactttgtctcaaagacggttataaagcctgaatcttgtgttccctgtggaaagcgcatcaaatttggcaagctgtctctcaaatgtcgagactgccgtttggtctctcatccagaatgtcgggatcgatgtccccttccctgcatttctcccctggtgggaactccagttaagattggagagggaatgttggcagattttgtgtcccagacttctccaatgattcctgctattgttgtcagctgtgtgaatgagatagagcagcgaggcctgactgaggcaggcttatacaggatctcaggctgtgaccgaacagtaaaagagctgaaagagagattcctcaaagtgaaaactgtacccctcctca

SEQ ID NO: 7150 - DNA, 509 bp, Cricetulus griseus; identical to SEQ ID NO: 3508

SEQ ID NO: 7151 - DNA, 476 bp, Cricetulus griseus; identical to SEQ ID NO: 3509

SEQ ID NO: 7152 - DNA, 557 bp, Cricetulus griseus; identical to SEQ ID NO: 3510

SEQ ID NO: 7153 - DNA, 545 bp, Cricetulus griseus; identical to SEQ ID NO: 3511

SEQ ID NO: 7154 - DNA, 445 bp, Cricetulus griseus; identical to SEQ ID NO: 3512

SEQ ID NO: 7155 - DNA, 492 bp, Cricetulus griseus; identical to SEQ ID NO: 3513
  misc_feature (77)..(77): n is a, c, g, or t

SEQ ID NO: 7156 - DNA, 560 bp, Cricetulus griseus; identical to SEQ ID NO: 3514
  misc_feature (337)..(355): n is a, c, g, or t
  misc_feature (485)..(501): n is a, c, g, or t

SEQ ID NO: 7157 - DNA, 452 bp, Cricetulus griseus; identical to SEQ ID NO: 3515

SEQ ID NO: 7158 - DNA, 294 bp, Cricetulus griseus; identical to SEQ ID NO: 3516

SEQ ID NO: 7159 - DNA, 86 bp, Cricetulus griseus; identical to SEQ ID NO: 3517

SEQ ID NO: 7160 - DNA, 116 bp, Cricetulus griseus; identical to SEQ ID NO: 3518
  misc_feature (34)..(67): n is a, c, g, or t

SEQ ID NO: 7161 - DNA, 264 bp, Cricetulus griseus
ctcttccggatcaccccggatggaaatgtgctcggggagcaacaagaccaagaagaagaagtcatcaagagtaccacttgacaaatccaagcaccagacggaagcaccccccctccagagagagcttttttcaatggatgtcgactcacagacccctatgtttgatgtcagcatgacagctgacgcgctggatacacctcatatcactccagctccaagccagtgtagtactcccccaacaacttacccacaaccagtatctca

SEQ ID NO: 7162 - DNA, 505 bp, Cricetulus griseus; identical to SEQ ID NO: 3520

SEQ ID NO: 7163 - DNA, 600 bp, Cricetulus griseus
tgggcaggggtcactggggcccagctggtgagcagtccttggtaccaactgggacacctcagctcagcctgaggcaaagaggtatagggatatatcgctctcccagctttttttttttttaagtcaaattcaaactaaccagcccagctcagggcctaaaattcacaaaggctaggggccgttttacagtcaccatggatcaccgcacccgtcaaagagggggtttaggccttattcgagtctctgggactcaaatccgaccccccagggtcccgtttccgttccatgttgaccaggaggctagggaaggaaaaaaatgggaacgagagctaccacgtcataggcctgtcatttacggaccctcaaaaagggaggagctacaggataatattatgatttctaagccagcaccttactgggaaggaacagctgtgataaatggagaattcaaggagctgaaactgactgactatcgggggaaatacttatttttcttcttctacccactcgatttcactttggtatgtccaactggaaatattgccttcggtgaccgaattgaagaattcagatctataaatactgaaggggggcatgctt

SEQ ID NO: 7164 - DNA, 600 bp, Cricetulus griseus
  misc_feature (324)..(350): n is a, c, g, or t
actggggaaggaactggagtgaccgctcaatattctctggcattgggtctactgctgagcccgtttctcagtctaccacttctgattatcagtgggatgttagccgtaatcatccctatatcgatgatgaatggtctgggttaaatggtttgtcttctgctgaccccagctcagactggaacgcaccagcagaggagtgggggaactgggtagatgaagaaagagcttcacttctgaagtcccaggaacccatccctaatgaccaaagggtttcagatgatgataaagaaaagggagagggagctcttgcaactggaaaatccnnnnnnnnnnnnnnnnnnnnnnnnnnngcaaggtgaagacaactctctcacacaggacacagaagagctagaaaaggacattagagaagaacttcccatgaatacctccaaagcccgtccaaaacaggagagagctttttccttgaaaacattaacactattgacccagatgaagcactggtcaaaaatagccagcctatcaagactcttccacctgctattctctaccgagccatctgtcaccttatcacatggtgactctgacaagagctcttcc

SEQ ID NO: 7165 - DNA, 600 bp, Cricetulus griseus
cagggaaactgtccgactactttccaaaaccataccccaaccctgaggctgccagagctgctaacaatggagccttacccccggacctcagctacattgtgcgagctaggcatggtggtgaggactatgtattctccttgctcactggttactgtgagccccccactggggtgtcattgcgagaaggcctctacttcaacccttactttcctggccaggccattggtatggctcctcccatctacaatgaagtcttggagtatgatgatggtaccccagctaccatgtcacaaatagccaaggatgttgccaccttccttcgatgggcatcagagccagagcatgaccatcggaaacgaatggggctcaagatgttgttgataatgggcttgctgctgcccctgacctatgccatgaagcggcataaatggtcagttctgaagagtcgaaagctggcatatcggccacccaagtgaccctgtccagtgtctgcttgtcctcttgcctgaagaagccctcaacagcccaggaagtcctaggccttttcaggcctgctccttttcatccaatagaaggaaatggggtaggagaccaggctct

SEQ ID NO: 7166 - DNA, 496 bp, Cricetulus griseus
  misc_feature (33)..(56): n is a, c, g, or t
  misc_feature (66)..(88): n is a, c, g, or t
tattttactaaaaaaacctacgtgtaagggggnnnnnnnnnnnnnnnnnnnnnnnngccacacccnnnnnnnnnnnnnnnnnnnnnnngctcctggcactagccataatatgagttaggtttaccttagcatgaaacaaatmgagcycctttgygacctcwctgaargagaatmtgaactagtatytggatttaacgyasagtatgctgsaggcccattmgcrctattcttyatagctgaatatactaacatkaktctaataaatgccctatcaactattgtattcttaggsccrtacaakaatmtcaacacatccagaaatatwkactactaatkttatrcttawgacrctaatattaacctccctattcctatgaattcgagcatcctacccacgcactccgatgtgatcaactcatacacttactatgaaaaaactaactcccattaactttagccctatgtacgtgatatatttctatacctgaattcatag

SEQ ID NO: 7167 - DNA, 598 bp, Cricetulus griseus
  misc_feature (36)..(81): n is a, c, g, or t
  misc_feature (100)..(155): n is a, c, g, or t
  misc_feature (162)..(167): n is a, c, g, or t
  misc_feature (173)..(175): n is a, c, g, or t
  misc_feature (181)..(191): n is a, c, g, or t
  misc_feature (207)..(230): n is a, c, g, or t
  misc_feature (492)..(507): n is a, c, g, or t
ctccagcctaktacccacacatgacctagtggggannnnnnnnnnnnnnnnnnnnnnnnnnnnnnnnnnnnnnnnnnnnnncattattaaacacatcagnnnnnnnnnnnnnnnnnnnnnnnnnnnnnnnnnnnnnnnnnnnnnnnnnnnnnnnnargcgannnnnnataaannnaagcannnnnnnnnnnatcatcttardggtgnnnnnnnnnnnnnnnnnnnnnnnnagagtacttagaaacttctttttccatctcagacrgaayctatggatctacattctttatagcaacargttttcacggtctccatgtaatcattggaacatcattccttacagtatgcttattacgacaatttaaatttcactttacatcaaaacaccatttcggatttgaagccgcagcatggkactgacactttgtagatgttgtatgacttttcctttacgtatcaatctattgatgaggctcatamwwwmwgaaaaannnnnnnnnnnnnnnnccgcccccgggggggacccccagctttggtcccctttagaggggggaaatggcgccctgggggaaataagggccaaagctgttccctgggg

SEQ ID NO: 7168 - DNA, 567 bp, Cricetulus griseus
tttggactacacccatgacttcrcctcagctatagaaggccctacaccagtctcagctctactacactstagcactatagtagtagcawraatctttytactaakccgctwscacccaataatctcaaataataacactgcycwtactatcatattatgtttaggttccataacaacactattcacagctaatctgtgccgctcacacaaaatgatattgaaaaaatcgtacccttctcaacatcaaaccaattaggcctaataatagtaacatgaggaattaaccaaccacacctagcctttctacacatactgtacacacgcattcttcaaagctatgttattcatatgctccggatcaattatccatagcctaaatgatgaacaagacattcgataaataggaggactattaaaaccactaccattcacctcatcatgcttgataattggaagcctagccctaacaggaataccattgctaacaagcgtttattcaaaggacttaatgatcgaagccgcatacacctgttgtacaaacggcctgacccctatgatttacactcg

SEQ ID NO: 7169 - DNA, 180 bp, Cricetulus griseus
tgaaatgcaactctgactattgtacagttaattcctcactgaggactccaaacattcctgtgtttcacgtgtactgaagaacactgttgtgtgatgcttggtgtaaagttattgtgaaaattttattgtctttatttttaccaaagatttcccatagttcgaagcatttgaagcaataaa

SEQ ID NO: 7170 - DNA, 460 bp, Cricetulus griseus
  misc_feature (26)..(70): n is a, c, g, or t
taccactctagtagaatgaatctgannnnnnnnnnnnnnnnnnnnnnnnnnnnnnnnnnnnnnnnnnnnnttccatttcatcctaccattcattatcgctgccctagcaatggkccatcttctattcsyacatgaraccggctctaataacccaacaggcctagattctgacscagataaaattccatttcatccctactatactattaaagacctactargagccttcatgctattaattgctctcatwactttartattgtktttcccagatattttargagaccctgataattatactyctgcrwatccactcaatactcccgcacacattaaaccagartgatacttcctattcgcctacgctatcctacgatctatccctaataaactaggargagtcctarccctaatcctctctatcctaatcctagcaactctatcattactacacacatct

SEQ ID NO: 7171 - DNA, 581 bp, Cricetulus griseus; identical to SEQ ID NO: 584

SEQ ID NO: 7172 - DNA, 529 bp, Cricetulus griseus; identical to SEQ ID NO: 3530
  misc_feature (38)..(55): n is a, c, g, or t

SEQ ID NO: 7173 - DNA, 783 bp, Cricetulus griseus; identical to SEQ ID NO: 3531
  misc_feature (111)..(118): n is a, c, g, or t
  misc_feature (120)..(146): n is a, c, g, or t
  misc_feature (202)..(208): n is a, c, g, or t
  misc_feature (210)..(222): n is a, c, g, or t
  misc_feature (225)..(226): n is a, c, g, or t
  misc_feature (259)..(267): n is a, c, g, or t
  misc_feature (280)..(303): n is a, c, g, or t
  misc_feature (429)..(465): n is a, c, g, or t
  misc_feature (494)..(503): n is a, c, g, or t
  misc_feature (507)..(510): n is a, c, g, or t
  misc_feature (516)..(541): n is a, c, g, or t

SEQ ID NO: 7174 - DNA, 560 bp, Cricetulus griseus
  misc_feature (137)..(164): n is a, c, g, or t
  misc_feature (508)..(522): n is a, c, g, or t
tagttattgcagctattataattcaaacaccatgaagttttataggagcctcagcactaataawcgywcawggbyttacatcttmtmtactmtywtgtsttgmtaatactaactatgaacgtatscacagccgaacnnnnnnnnnnnnnnnnnnnnnnnnnnnngctytycccctyawagccctattttgattcttaggaagcctwactaacctarcccttccaccatcaatcaatytaattggagaattactaayctcaawttyactayyctcatgatcwaattttaccatcttattagtaggaactaacatcctaattacagccctatattcactatatatactaatwactwctcaacgaggtaagttaacaccacatataattaatctacaaccatcacacacacgagaacttaccttaataatactccacattacaccactttcacttttaatgattaacccaaaatttatcataggcaatacattataaaaaaaaaaagcttnnnnnnnnnnnnnnncgcccccccgcggggggcctccacttttggttccctta

SEQ ID NO: 7175 - DNA, 600 bp, Cricetulus griseus
agacaggcgatgccattacccggytmaarsaggtcctakagtacaatgctgtgggaggcaagtacaatcggggtttgactgtgttgcaagcataccgggagctggtggagccsadgaaacaggatgctgakagtcttcadcgggccctgacagygggcykgtgtgtagaactgctccaggctttctttcttgtgtcagatgacatcatgrattcctccctcactcgacgtggacagatctgctggtatcaraagccargcatargcttggatgccatcaatgatgctatgcttctggaagcctgcatctaccgcctactgaagttctactgcagggagcagccctactacctgaacctcctggagctctttctgcagagttcctatcagacggagattgggcagactctcgacctcatcacagcaccccakggccatgtggatcttgatagatacactgaaaagaggtacaaatctattgtcaagtacaagacagctttctattctttctacctgcctgttgcagctgccatgtacatggccggtattgatggggagaaggaacatgccaatgccaagaagatcctgctggagatgggag

SEQ ID NO: 7176 - DNA, 277 bp, Cricetulus griseus; identical to SEQ ID NO: 3534

SEQ ID NO: 7177 - DNA, 447 bp, Cricetulus griseus; identical to SEQ ID NO: 3535

SEQ ID NO: 7178 - DNA, 540 bp, Cricetulus griseus; identical to SEQ ID NO: 3536

SEQ ID NO: 7179 - DNA, 586 bp, Cricetulus griseus
tccgaatagatttccaaggcagaaggggttgaaggcaagcccatgactgctatcacgggccatgggcatggcagatgggcccagccattgctgtgcagagtgtagcaatagagagcccctcactgtcgcatggccctccccagagcatgcccaacccaggagtctgtctcattgtttatctaaccaccaagagagcccctcccttaaaacagtatgccctcacaaacctaccatgtgaatgaactgggaaaggggcatgacccccaggtgtgtatagctgtgagtttcaataatctagcactatgttggacccactccccttccacccagccagctttgctgtcagatacaagtcctgttccctgtttgtcctcttccagggactgtagcctggaggcttccacacagcccacacatctcttaggctccattataatcactttcctagagacgctggcctgtctgtgaaggctgagcttgtgtgtggtgttgggtttatgcctcctgctccctcccaccctgtatctgggcatagttcacatcaagtgtgtatccgccaggctccaggacctttctggatttgcca

SEQ ID NO: 7180 - DNA, 73 bp, Cricetulus griseus
ctcggggactgttgctattttccgattcttcaccctaatgtctaccgctttctattgtgttaagaaagggaat

SEQ ID NO: 7181 - DNA, 520 bp, Cricetulus griseus
  misc_feature (60)..(60): n is a, c, g, or t
  misc_feature (65)..(65): n is a, c, g, or t
  misc_feature (72)..(72): n is a, c, g, or t
  misc_feature (139)..(139): n is a, c, g, or t
  misc_feature (146)..(146): n is a, c, g, or t
  misc_feature (177)..(177): n is a, c, g, or t
  misc_feature (183)..(183): n is a, c, g, or t
  misc_feature (242)..(242): n is a, c, g, or t
  misc_feature (345)..(363): n is a, c, g, or t
  misc_feature (439)..(439): n is a, c, g, or t
  misc_feature (479)..(479): n is a, c, g, or t
tacgcctgcgcgcaccggcaggcgtctcgaggcgggtggtggacgatggcggcggcccangccgnggagganatgcggacgcgcgtggttctgggagagttcggggttcgcaacgtccacaccaccgacttccccggtnactactngggttacgacgacgcctgggaccaggaccgnttcganaagaatttccgtgtggatgttgttcatatggatgaaaatacactggagttcgacatggngggaattgatgctgccattgctaatgctttccggagaattctgttagctgaggtgccaacaatggcagtggaaaaggttctggtttataataacacatccatnnnnnnnnnnnnnnnnnnngctcaccgcctggggctcatccccattcttgctgatccacgtctgtttgaatataggaacccaggggaggaagaangaacggagatagacacactgcagtttcggctacaggtcangtgtaccaagaaccccaatgctgctaaggattcctctgatc

SEQ ID NO: 7182 - DNA, 421 bp, Cricetulus griseus
  misc_feature (276)..(276): n is a, c, g, or t
  misc_feature (341)..(341): n is a, c, g, or t
attctctctcagcccacaccctcgcttgttgtggaccataggcgcttaaaaaatcttttggagactgttgttaaaaaaagtcaggaatataatatattccaactggaaaacttgtatgcagttatcagccagtgcatttatgagcatcgcagggactatgacaaaacagctcttgttcagaaaatggagcaagcagtagaaaacttcaattgttccagatcatgatgtcattgcaccaagtatttttatattcaattcctatttgattgtcttcanatatgtccacataactgatgcaagataaaatgaaatcttgcattttgaagaaaaattaaaatagngaaagtattttaattccctggtacttatgtacatgtggtaagataactgataagtcttggatgtttgagcagaacactgt

SEQ ID NO: 7183 - DNA, 323 bp, Cricetulus griseus; identical to SEQ ID NO: 3541
  misc_feature (224)..(239): n is a, c, g, or t

SEQ ID NO: 7184 - DNA, 567 bp, Cricetulus griseus; identical to SEQ ID NO: 3542

SEQ ID NO: 7185 - DNA, 579 bp, Cricetulus griseus; identical to SEQ ID NO: 3543
  misc_feature (474)..(498): n is a, c, g, or t

SEQ ID NO: 7186 - DNA, 498 bp, Cricetulus griseus; identical to SEQ ID NO: 3544
  misc_feature (135)..(156): n is a, c, g, or t
  misc_feature (161)..(214): n is a, c, g, or t
  misc_feature (246)..(297): n is a, c, g, or t
  misc_feature (321)..(371): n is a, c, g, or t
  misc_feature (382)..(396): n is a, c, g, or t
  misc_feature (398)..(412): n is a, c, g, or t
  misc_feature (414)..(447): n is a, c, g, or t

SEQ ID NO: 7187 - DNA, 579 bp, Cricetulus griseus; identical to SEQ ID NO: 3545

SEQ ID NO: 7188 - DNA, 571 bp, Cricetulus griseus
  misc_feature (396)..(512): n is a, c, g, or t
gtagctgccaagaccaagggccctgcaggggaccgagtccggccactaagtgcccgcagtgagcctgcagacaagccaggccgtgtgcccctcaccaggaagccctcagtccccaagactgtctcaaaagtgtctcctgccacgaggacctcctctgggctcagtggccgcccagtgccacctggggctggctcccctgtctacctggacctggcttacctgcctgggggtggcgcgggccacctggacccggactttttccttcgagtacgtgcactctgctatgtcatcagtgggcagggccagcgccaggaagagggcctgcgggccgtgttggatgcactgctggctggcaagcagcagtgggaccttgacctgcaggtcacactgatcccnnnnnnnnnnnnnnnnnnnnnnnnnnnnnnnnnnnnnnnnnnnnnnnnnnnnnnnnnnnnnnnnnnnnnnnnnnnnnnnnnnnnnnnnnnnnnnnnnnnnnnnnnnnnnnnnnnnnnccctgcctgcatagtggagttctagccacgggccacagcacaccctgaggacagcagct

SEQ ID NO: 7189 - DNA, 355 bp, Cricetulus griseus; identical to SEQ ID NO: 3547

SEQ ID NO: 7190 - DNA, 216 bp, Cricetulus griseus; identical to SEQ ID NO: 3548

SEQ ID NO: 7191 - DNA, 567 bp, Cricetulus griseus; identical to SEQ ID NO: 3549

SEQ ID NO: 7192 - DNA, 550 bp, Cricetulus griseus; identical to SEQ ID NO: 3550

SEQ ID NO: 7193 - DNA, 472 bp, Cricetulus griseus; identical to SEQ ID NO: 3551

SEQ ID NO: 7194 - DNA, 600 bp, Cricetulus griseus; identical to SEQ ID NO: 3552

SEQ ID NO: 7195 - DNA, 479 bp, Cricetulus griseus; identical to SEQ ID NO: 3553

SEQ ID NO: 7196 - DNA, 440 bp, Cricetulus griseus; identical to SEQ ID NO: 3554

SEQ ID NO: 7197 - DNA, 377 bp, Cricetulus griseus; identical to SEQ ID NO: 3555

SEQ ID NO: 7198 - DNA, 328 bp, Cricetulus griseus; identical to SEQ ID NO: 3556
  misc_feature (37)..(51): n is a, c, g, or t
  misc_feature (198)..(198): n is a, c, g, or t
  misc_feature (249)..(249): n is a, c, g, or t

SEQ ID NO: 7199 - DNA, 580 bp, Cricetulus griseus; identical to SEQ ID NO: 3557
  misc_feature (342)..(364): n is a, c, g, or t

SEQ ID NO: 7200 - DNA, 128 bp, Cricetulus griseus; identical to SEQ ID NO: 3558

SEQ ID NO: 7201 - DNA, 512 bp, Cricetulus griseus; identical to SEQ ID NO: 3559
  misc_feature (332)..(392): n is a, c, g, or t

SEQ ID NO: 7202 - DNA, 579 bp, Cricetulus griseus; identical to SEQ ID NO: 3560
  misc_feature (522)..(522): n is a, c, g, or t

SEQ ID NO: 7203 - DNA, 566 bp, Cricetulus griseus; identical to SEQ ID NO: 3561

SEQ ID NO: 7204 - DNA, 553 bp, Cricetulus griseus; identical to SEQ ID NO: 3562

SEQ ID NO: 7205 - DNA, 312 bp, Cricetulus griseus; identical to SEQ ID NO: 3563

SEQ ID NO: 7206 - DNA, 475 bp, Cricetulus griseus; identical to SEQ ID NO: 3564

SEQ ID NO: 7207 - DNA, 409 bp, Cricetulus griseus; identical to SEQ ID NO: 3565

SEQ ID NO: 7208 - DNA, 489 bp, Cricetulus griseus; identical to SEQ ID NO: 3566

SEQ ID NO: 7209 - DNA, 350 bp, Cricetulus griseus; identical to SEQ ID NO: 3567
  misc_feature (69)..(105): n is a, c, g, or t

SEQ ID NO: 7210 - DNA, 264 bp, Cricetulus griseus; identical to SEQ ID NO: 3568

SEQ ID NO: 7211 - DNA, 480 bp, Cricetulus griseus; identical to SEQ ID NO: 3569

SEQ ID NO: 7212 - DNA, 286 bp, Cricetulus griseus; identical to SEQ ID NO: 3570

SEQ ID NO: 7213 - DNA, 420 bp, Cricetulus griseus; identical to SEQ ID NO: 3571

SEQ ID NO: 7214 - DNA, 540 bp, Cricetulus griseus; identical to SEQ ID NO: 3572
  misc_feature (307)..(307): n is a, c, g, or t
  misc_feature (381)..(402): n is a, c, g, or t
  misc_feature (477)..(477): n is a, c, g, or t

SEQ ID NO: 7215 - DNA, 555 bp, Cricetulus griseus
agcccatcttcacactacggaagaagctgtttttccctcctaagtgatgtgtgctctacatggttgacattatgtcagtctatgcacttttgtttggggggaggggtgggttttaatttattttttatgatttcttttattttgagatattatatcatttacctcttccctttcctccctgaaaagttggaatttgaagtccaaagcagaagcttgataaatggaacatcagttctaagtaaggtggcactctgaagccaggaaggttgtacgctaaccttactggcttctatttactagctccatgtctgtctgacagaacgtttaatttctgtaaacattaggctccacatcagtaaagtaggagcaatgaatttctagatcagcaaagcccttagcacaggcatggtatgtgctaaatgctcagcagcactctggccattttactgtttcttcctagttgaaatggatgtgttcccattctgacgccctgtaaacagggattgtgttcattatttctgtggttactggtgggtattaaaggtgggtgaatgc

SEQ ID NO: 7216 - DNA, 548 bp, Cricetulus griseus
gtcatcctctctcatggctgccaggccagccacctgcagttcccaggtgccgtctatggcacagacggatgctccgtgtcggtcgagaagattgtgaacatcttcagtgggactggctgtcctagcctgggagggaagccgaagctgttcttcatccaggcctgtggtggcgagcagaaagaccatggctttgaggtggcctgcacttcctctcgaggcagggacttagacagtgactctgagccagatgctgtcccataccaggaaggcccaaggccctttgaccagctggatgccgtgtcaagtttgcccacccccagcgacatccttgtatcctattccaccttcccaggttttgtctcctggagagacaagaagagcggctcctggtacatagagaccttggatggtgtcctggagcagtgggctcactctgaagacctgcagtccctccttctcagggtcgcccatgcagtttctgagaaagggatttataaacagattcctggctgttttaacttcctccggaaaaagctgttttttaaaac

SEQ ID NO: 7217 - DNA, 550 bp, Cricetulus griseus
agacccccagtgccatcaatggcaacccatcctggcacctggcggacagccccgcggtaaatggagccactggccacagcagcagtttggatgcacgggaggtgatccccatggcagccgtaaagcaagcgctgagagaggccggcgatgagtttgagctgcggtaccggcgggcgttcagtgatctaacatcccagcttcatataaccccagggactgcatatcaaagctttgaacaggtagtgaatgaactcttccgggatggggtaaactggggtcgcattgtggcctttttctccttcggtggagccctctgtgtggaaagcgtagacaaggagatgcaggtattggtgagtcggatcgcaagttggatggccacctacctgaatgaccacctagagccttggatccaggacaacggcggctgggacactttcgtggaactctacggaaacaatgcagcagctgagagccggaaaggccaggagcgcttcaaccgctggttcctgacgggcatgactgtggctggtgtggttctgctgggctctct

SEQ ID NO: 7218 - DNA, 391 bp, Cricetulus griseus; identical to SEQ ID NO: 3576

SEQ ID NO: 7219 - DNA, 600 bp, Mus musculus
acacgggaaacctcacccggcccggacacggacaggattgacagattgatagctctttctcgattccgtgggtggtggtgcatggccgttcttagttggtggagcgatttgtctggttaattccgataacgaacgagactctggcatgctaactagttacgcgacccccgagcggtcggcgtcccccaacttcttagagggacaagtggcgttcagccacccgagattgagcaataacaggtctgtgatgcccttagatgtccggggctgcacgcgcgctacactgactggctcagcgtgtgcctaccctgcgccggcaggcgcgggtaacccgttgaaccccattcgtgatggggatcggggattgcaattattccccatgaacgaggaattcccagtaagtgcgggtcataagcttgcgttgattaagtccctgccctttgtacacaccgcccgtcgctactaccgattggatggtttagtgaggccctcggatcggccccgccggggtcggcccacggccctggcggagcgctgagaagacggtcgaacttgactatctagaggaagtaaaagtcgtaacaaggtttccgtaggtga

SEQ ID NO: 7220 - DNA, 620 bp, Rattus norvegicus
caacacgggaaacctcacccggcccggacacggacaggattgacagattgatagctctttctcgattccgtgggtggtggtgcatggccgttcttagttggtggagcgatttgtctggttaattccgataacgaacgagactctggcatgctaactagttacgcgacccccgagcggtcggcgtcccccaacttcttagagggacaagtggcgttcagccacccgagattgagcaataacaggtctgtgatgcccttagatgtccggggctgcacgcgcgctacactgactggctcagcgtgtgcctaccctacgccggcaggcgcgggtaacccgttgaaccccattcgtgatggggatcggggattgcaattattccccatgaacgaggaattcccagtaagtgcgggtcataagcttgcgttgattaagtccctgccctttgtacacaccgcccgtcgctactaccgattggatggtttagtgaggccctcggatcggccccgccggggtcggcccacggccttgcggagcgctgagaagacggtcgaacttgactatctagaggaagtaaaagtcgtaacaaggtttccgtaggtgaacctgcggaaggatcatta

SEQ ID NO: 7221 - DNA, 600 bp, Mus musculus
atcctgccagtagcatatgcttgtctcaaagattaagccatgcatgtctaagtacgcacggccggtacagtgaaactgcgaatggctcattaaatcagttatggttcctttggtcgctcgctcctctcctacttggataactgtggtaattctagagctaatacatgccgacgggcgctgaccccccttcccggggggggatgcgtgcatttatcagatcaaaaccaacccggtgagctccctcccggctccggccgggggtcgggcgccggcggcttggtgactctagataacctcgggccgatcgcacgccccccgtggcggcgacgacccattcgaacgtctgccctatcaactttcgatggtagtcgccgtgcctaccatggtgaccacgggtgacggggaatcagggttcgattccggagagggagcctgagaaacggctaccacatccaaggaaggcagcaggcgcgcaaattacccactcccgacccggggaggtagtgacgaaaaataacaatacaggactctttcgaggccctgtaattggaatgagtccactttaaatcctttaacgaggatccattggagggcaagtct

SEQ ID NO: 7222 - DNA, 620 bp, Rattus norvegicus
tacctggttgatcctgccagtagcatatgcttgtctcaaagattaagccatgcatgtctaagtacgcacggccggtacagtgaaactgcgaatggctcattaaatcagttatggttcctttgtcgctcgctcctctcctacttggataactgtggtaattctagagctaatacatgccgacgggcgctgaccccccttcccgtgggggggacgcgtgcatttatcagatcaaaaccaacccggtcagccccctcccggctccggccgggggtcgggcgccggacggctttggtgactctagataacctcgggccgatcgcacgccctccgtggcggcgacgacccattcgaacgtctgccctatcaactttcgatggtagtcgccgtgcctaccatggtgaccacgggtgacggggaatcagggttcgattccggagagggagcctgagaaacggctaccacatccaaggaaggcagcaggcgcgcaaattacccactcccgacccggggaggtagtgacgaaaaataacaatacaggactctttcgaggccctgtaattggaatgagtccactttaaatcctttaacgaggatccattggagggcaagtctggtgccag

SEQ ID NO: 7223 - DNA, 600 bp, Mus musculus
ttccagctccaatagcgtatattaaagttgctgcagttaaaaagctcgtagttggatcttgggagcgggcgggcggtccgccgcgaggcgagtcaccgcccgtccccgccccttgcctctcggcgccccctcgatgctcttagctgagtgtcccgcggggcccgaagcgtttactttgaaaaaattagagtgttcaaagcaggcccgagccgcctggataccgcagctaggaataatggaataggaccgcggttctattttgttggttttcggaactgaggccatgattaagagggacggccgggggcattcgtattgcgccgctagaggtgaaattcttggaccggcgcaagacggaccagagcgaaagcatttgccaagaatgttttcattaatcaagaacgaaagtcggaggttcgaagacgatcagataccgtcgtagttccgaccataaacgatgccgactggcgatgcggcggcgttattcccatgacccgccgggcagcttccgggaaaccaaagtctttgggttccggggggagtatggttgcaaagctgaaacttaaaggaattgacggaagggcaccaccaggagtgggc

SEQ ID NO: 7224 - DNA, 620 bp, Rattus norvegicus
gcggtaattccagctccaatagcgtatattaaagttgctgcagttaaaaagctcgtagttggatcttgggagcgggcgggcggtccgccgcgaggcgagtcaccgcccgtccccgccccttgcctctcggcgccccctcgatgctcttagctgagtgtcccgcggggcccgaagcgtttactttgaaaaaattagagtgttcaaagcaggcccgagccgcctagataccgcagctaggaataatggaataggaccgcggttctattttgttggttttcggaactgaggccatgattaagagggacggccgggggcattcgtattgcgccgctagaggtgaaattcttggaccggcgcaagacggaccagagcgaaagcatttgccaagaatgttttcattaatcaagaacgaaagtcggaggttcgaagacgatcagataccgtcgtagttccgaccataaacgatgccgactggcgatgcggcggcgttattcccatgacccgccgggcagcttccgggaaaccaaagtctttgggttccggggggagtatggttgcaaagctgaaacttaaaggaattgacggaagggcaccaccaggagtgggcctgcggcttaatt

SEQ ID NO: 7225 - DNA, 616 bp, Cricetinae gen. sp.
  misc_feature (51)..(69): n is a, c, g, or t
  misc_feature (578)..(593): n is a, c, g, or t
cctaacttgcgcagaaaaaaaatgagacaacattggcatggctttgttttnnnnnnnnnnnnnnnnnnnggttttttaaaattttttttaaaaaaggttttgttttggcgcttttgactcaggatttaaaaactggaacggtgaaggcgacagcagtcttggagcaagcatcccccaaagttttacaatgtggctgaggactttgattgtacatttttttttcttttttaagtcattccaagtacccatgagatggctacaggaagtccctcaccctcccaaaagccaccccaattccctagaggaggatggctgagtccatgccctgagtccacactggggaggtgacagcattgcttctgtgtaaattatgtactgcgaaaattttttttaaatcttccgccttaatacttttttagttttgtttttatttttgaatggtcagccatcgtgaccctcatgggtgtttttttttgtccccccaacttgagtatgaaggctttggtctcccctgggagtgggttgaggtgttgaggcagccagaggggcttgcctgtacactgacttgagaccagttnnnnnnnnnnnnnnnnttacaaaccgtaaaaaaaaaaaa

SEQ ID NO: 7226 - DNA, 331 bp, Mus musculus
actacattcaattccatcatgaagtgtgacgttgacatccgtaaagacctctatgccaacacagtgttgtctggtggtaccaccatgtacccaggcattgctgacaggatgcagaaggagattactgctctggctcctagcaccatgaagatcaagatcattgctcctcctgagcgcaagtactctgtgtggatcggtggctccatcttggcctcactgtccaccttccagcagatgtggatcagcaagcaggagtacgatgagtccggcccctccatcgtgcaccgcaagtgcttctaggcggactgttactgagctgcgttttacaccc

SEQ ID NO: 7227 - DNA, 597 bp, Rattus norvegicus
atgagacatttggcatggctttattgtttttttgttttttgtttttgttttttttaaattttttttttaaaaaggttttttttttttgttttgttttggcgcttttgactcaaggatttaaaaactggaacggtgaaggcgaccgcagttggttggagcaaacatcccccaaagttctacaatgtggctgaggactttgattgtacattgttttttgtttttggtttttttaatagtcactccaagtatccacggcatagatggttacaggaagtccctcaccctcccaaaagccacccccaactcctaaggggaggatggctgcatccatgccctgagtccacaccgggaaggtgacagcattgcttctgtgtaaattatgtacttgcaaacatttttttaaatcttccgccttaatacttcatttttgtttttaatttctgaatggtcagccattcgtggcctgccccttttttttgtccccccaacttgatgtatgaaggctttggtctccctgggagtggtttgaggtgttgaggcgccagggctggcctgtacactgacgtgagaccgttttaataaaagtgcacaccttac

SEQ ID NO: 7228 - DNA, 615 bp, Cricetinae gen. sp.
gagcacagacctctcgcagctctttcttcgccgctccacacccgccaccagttcgccatggatgacgatatcgctgcgctcgttgtcgacaacggctccggcatgtgcaaagccggcttcgcgggcgacgatgctccccgggccgtcttcccctccatcgtgggccgccctaggcaccagggcgtgatggtgggcatgggccagaaggactcgtacgtgggtgacgaggcccagagcaagagaggtatyctgaccctgaagtaycccattgarcacggcattgtcaccaactgggacgayatggagaagatctggcaccacaccttytacaaygarctgcgtgtggccccygaggagcaccckgtgctkctsacygaggcccccctgaacccyaaggccaaccgtgaaaagatgacccagatcatgtttgagaccttcaacaccccagccatgtacgtagccattcaggccgtgctgtccctgtatgcctctggtcgtaccactggcattgtgatggactccggagacggggtcacccacactgtgcccatctatgagggctacgctctccctcatgccatcctgcgtctggacctggctggmcgggacctkmca

SEQ ID NO: 7229 - DNA, 330 bp, Mus musculus
atggtgggaatgggtcagaaggactcctatgtgggtgacgaggcccagagcaagagaggtatcctgaccctgaagtaccccattgaacatggcattgttaccaactgggacgacatggagaagatctggcaccacaccttctacaatgagctgcgtgtggcccctgaggagcaccctgtgctgctcaccgaggcccccctgaaccctaaggccaaccgtgaaaagatgacccagatcatgtttgagaccttcaacaccccagccatgtacgtagccatccaggctgtgctgtccctgtatgcctctggtcgtaccacgggcattgtgatg

SEQ ID NO: 7230 - DNA, 597 bp, Rattus norvegicus
atggatgacgatatcgctgcgctcgtcgtcgacaacggctccggcatgtgcaaggccggcttcgcgggcgacgatgctccccgggccgtcttcccctccatcgtgggccgccctaggcaccagggtgtgatggtgggtatgggtcagaaggactcctacgtgggcgacgaggcccagagcaagagaggcatcctgaccctgaagtaccccattgaacacggcattgtaaccaactgggacgatatggagaagatttggcaccacactttctacaatgagctgcgtgtggcccctgaggagcaccctgtgctgctcaccgaggcccctctgaaccctaaggccaaccgtgaaaagatgacccagatcatgtttgagaccttcaacaccccagccatgtacgtagccatccaggctgtgttgtccctgtatgcctctggtcgtaccactggcattgtgatggactccggagacggggtcacccacactgtgcccatctatgagggttacgcgctccctcatgccatcctgcgtctggacctggctggccgggacctgacagactacctcatgaagatcctgaccgagcgtggctacagc

SEQ ID NO: 7231 - DNA, 615 bp, Cricetinae gen. sp.
gmctwcctymtkaagwtcctgaccgagcgtggctacagcttcaccaccacagccgagagggaaattgtgcgtgacatcaaagagaagctgtgctatgttgccctggacttcgagcaagagatggccactgccgcatcctcttcctccctggagaagagctatgagctgcctgatggccaggtcatcaccattggcaacgagcggttccgttgccctgaggcycttttccagccttccttcctgggtatggaatcctgtggcatccacgaaactacattcaactccatcatgaagtrtgacgtygacatccgmaaagacctctatsccaacacagtgctgtctggtggyaccaccatgtacccaggcattgctgaccggatgcagaaggagatcactgctctggctcccagcaccatgaagatcaagatcattgctccycctgagcgcaagtactctgtgtggatcggtggctccatcctggcctcactgtccaccttccagcagatgtggatcagcaagcaggagtacgatgagtccggcccctccatcgtccaccgcaaatgcttctaggcggactgttactgagctgcgttttacaccctttctttgacaaaa

SEQ ID NO: 7232 - DNA, 330 bp, Mus musculus
ccacactgtgcccatctacgagggctatgctctccctcacgccatcctgcgtctggacttggctggccgggacctgacggactacctcatgaagatcctgaccgagcgtggctacagcttcaccaccacagctgagagggaaatcgtgcgtgacatcaaagagaagctgtgctatgttgctctagacttcgagcaggagatggccactgccgcatcctcttcctccctggagaagagctatgagctgcctgacggccaagtcatcactattggcaacgagcggttccgatgccctgaggctcttttccagccttccttcttgggtatgga

SEQ ID NO: 7233 - DNA, 597 bp, Rattus norvegicus
tcaccaccacagctgagagggaaatcgtgcgtgacattaaagagaagctgtgctatgttgccctagacttcgagcaagagatggccactgccgcatcctcttcctccctggagaagagctatgagctgcctgacggtcaggtcatcactatcggcaatgagcggttccgatgccccgaggctctcttccagccttccttcctgggtatggaatcctgtggcatccatgaaactacattcaattccatcatgaagtgtgacgttgacatccgtaaagacctctatgccaacacagtgctgtctggtggcaccaccatgtacccaggcatcgctgacaggatgcagaaggagattactgccctggctcctagcaccatgaagatcaagatcattgctcctcctgagcgcaagtactctgtgtggattggtggctctatcctggcctcactgtccaccttccagcagatgtggatcagcaagcaggagtacgatgagtccggcccctccatcgtgcaccgcaaatgcttctaggcggactgttactgagctgcgttttacaccctttctttgacaaaacctaacttgcgcagaaaaaaaa

SEQ ID NO: 7234 - DNA, 334 bp, Escherichia coli
tgatgtcgatgcctttgattttattcgcaccattgcggtcgcgcggatcatgatgccaacctcttacgtgcgcctttctgccggacgcgagcagatgaacgaacagactcaggcgatgtgctttatggcaggcgcaaactcgattttctacggttgcaaactgctgaccacgccgaatccggaagaagataaagacctgcaactgttccgcaaactggggctaaatccgcagcaaactgccgtgctggcaggggataacgaacaacagcaacgtcttgaacaggcgctgatgaccccggacaccgacgaatattacaacgcggcagcattatga

SEQ ID NO: 7235 - DNA, 334 bp, Escherichia coli
atggctcaccgcccacgctggacattgtcgcaagtcacagaattatttgaaaaaccgttgctggatctgctgtttgaagcgcagcaggtgcatcgccagcatttcgatcctcgtcaggtgcaggtcagcacgttgctgtcgattaagaccggagcttgtccggaagattgcaaatactgcccgcaaagctcgcgctacaaaaccgggctggaagccgagcggttgatggaagttgaacaggtgctggagtcggcgcgcaaagcgaaagcggcaggatcgacgcgcttctgtatgggcgcggcgtggaagaatccccacgaacgcgatatgccgt

SEQ ID NO: 7236 - DNA, 333 bp, Escherichia coli
ggggtaaaagcgatggggctggaggcgtgtatgacgctgggcacgttgagtgaatctcaggcgcagcgcctcgcgaacgccgggctggattactacaaccacaacctggacacctcgccggagttttacggcaatatcatcaccacacgcacttatcaggaacgcctcgatacgctggaaaaagtgcgcgatgccgggatcaaagtctgttctggcggcattgtgggcttaggcgaaacggtaaaagatcgcgccggattattgctgcaactggcaaacctgccgacgccgccggaaagcgtgccaatcaacatgctggtgaaggtgaaaggc

SEQ ID NO: 7237 - DNA, 337 bp, Escherichia coli
accacgctggtgcagggatcgttacccgaactgcatcaggcgtggcaggcggtggacgagcgtccgcatgctaatcgctttttaccgccagatgaaatcgaacagtcgctgaacggcgtgcattatcaacatcatattcagcccatcacgctgtggtttgatgatgcgctcagtgccatgcgttcgctgaaaggcatcggtgccacgcatcttcatgaagggcgcgacccgcgaatattaacgcgttcgcagttgcagcgattgcaactggcctggccgcaacagcaggggcgatatcctctgacgtatcatctttttttgggagtgattgctcgtg

SEQ ID NO: 7238 - DNA, 415 bp, Escherichia coli
atggcaacggttaataaacaagccattgcagcggcatttggtcgggcagccgcacactatgagcaacatgcagatctacagcgccagagtgctgacgccttactggcaatgcttccacagcgtaaatacacccacgtactggacgcgggttgtggacctggctggatgagccgccactggcgggaacgtcacgcgcaggtgacggccttagatctctcgccgccaatgcttgttcaggcacgccagaaggatgccgcagaccattatctggcgggagatatcgaatccctgccgttagcgactgcgacgttcgatcttgcatggagcaatctcgcagtgcagtggtgcggtaatttatccacggcactccgcgagctgtatcgggtggtgcgccccaaaggcgtggtcgcgttta

SEQ ID NO: 7239 - DNA, 339 bp, Escherichia coli
acaacaggctgactgggtgttagtggaaggtgctggcggctggtttacgccgctttctgacactttcacttttgcagattgggtaacacaggaacaactgccggtgatactggtagttggtgtgaaactcggctgtattaatcacgcgatgttgactgcacaggtaatacaacacgccggactgactctggcgggttgggtggcgaacgatgttacgcctccgggaaaacgtcacgctgaatatatgaccacgctcacccgcatgattcccgcgccgctgctgggagagatcccctggcttgcagaaaatccagaaaatgcggcaaccggaaagtacat

SEQ ID NO: 7240 - DNA, 285 bp, Escherichia coli
ttattttgtcaccggaacggataccgaagtggggaaaactgtcgccagttgtgcacttttacaagccgcaaaggcagcaggctaccggacggcaggttataaaccggtcgcctctggcagcgaaaagaccccggaaggtttacgcaatagcgacgcgctggcgttacagcgcaacagcagcctgcagctggattacgcaacagtaaatccttacaccttcgcagaacccacttcgccgcacatcatcagcgcgcaagagggcagaccgatagaatcattggtaat

SEQ ID NO: 7241 - DNA, 468 bp, Enterobacteria phage P1
gacggtgggagaatgttaatccatattggcagaacgaaaacgctggttagcaccgcaggtgtagagaaggcacttagcctgggggtaactaaactggtcgagcgatggatttccgtctctggtgtagctgatgatccgaataactacctgttttgccgggtcagaaaaaatggtgttgccgcgccatctgccaccagccagctatcaactcgcgccctggaagggatttttgaagcaactcatcgattgatttacggcgctaaggatgactctggtcagagatacctggcctggtctggacacagtgcccgtgtcggagccgcgcgagatatggcccgcgctggagtttcaataccggagatcatgcaagctggtggctggaccaatgtaaatattgtcatgaactatatccgtaacctggatagtgaaacaggggcaatggtgcgcctgctggaagatgccgattag

SEQ ID NO: 7242 - DNA, 528 bp, Enterobacteria phage P1
atgtccaatttactgaccgtacaccaaaatttgcctgcattaccggtcgatgcaacgagtgatgaggttcgcaagaacctgatggacatgttcagggatcgccaggcgttttctgagcatacctggaaaatgcttctgtccgtttgccggtcgtgggcggcatggtgcaagttgaataaccggaaatggtttcccgcagaacctgaagatgttcgcgattatcttctatatcttcaggcgcgcggtctggcagtaaaaactatccagcaacatttgggccagctaaacatgcttcatcgtcggtccgggctgccacgaccaagtgacagcaatgctgtttcactggttatgcggcggatccgaaaagaaaacgttgatgccggtgaacgtgcaaaacaggctctagcgttcgaacgcactgatttcgaccaggttcgttcactcatggaaaatagcgatcgctgccaggatatacgtaatctggcatttctggggattgcttataacaccctgttacgtatagccgaa

SEQ ID NO: 7243 - DNA, 594 bp, Bacillus subtilis
gtcaaacaggaaaaaaaagtaatgatatgcgatttgacagaagcggaactctcttctaacggtacggtcagtttgcgtaaagaagaagcagctgaagcagcccgcatattaggcgcagataaaagaattcagctaacgcttccagaccgcggcctaataatgagtgatcaggcaattcggtcaattgtcactgtcatcagaatctgtcggccaaaagcggtttttatgccgtataaaaaggatcgccatccggatcacggcaatgcggctgcactggtggaagaagcgatcttttccgccggaatccataaatataaagacgaaaaaagccttccggcgcataaagtcagcaaggtttactattatatgataaatggttttcatcagccggattttgttattgatatctcggatacaatagaggcaaagaaacaaagcctcaacgcctacaaaagccagtttatcccgtcaaaggattccgtttctactcctctgacgaatgggtatattgaaatcgttgaagcgagagaaaagctttacggtaaagaagcgggcgtggagtatgccgaagtttcttttccaaacggatgctga

SEQ ID NO: 7244 - DNA, 612 bp, Bacillus subtilis
atgtcaaacgaaacaattaaattagtcattgcgggaccgcgtggaagaatggggcaggaagctgttaaattggcagaacgaacaccacattttgaccttgtaggggccatagaccatacatacgatcagcaaaaattatctgatgtgatgcctgttgagtcagatgctttcatttacacagatatccatgcctgttttacagaaacacaaccggatgtcttgattgatttaacaacgcccgaaatcggaaaagtacatacaaaaattgcattagagcacggagtccgtccagttgtcggaacaaccggtttctcagaagctgatttaaaagagctcacatctttaacagaagaaaaagggatcggagccatcatcgcgccaaattttgcgctcggtgcgatactgatgatgaaattttcaaaaatggctgccaactattttgaggatgttgagattattgagcttcatcatgaccagaagcttgacgcaccaagcggaactgcgcttaaaacagcggaaatgatttcagaagtccgtaaagaaaagcagcaaggacatccggatgaaaaagaaattctcccaggagcaagaggagcggagcaaaacggtatt

SEQ ID NO: 7245 - DNA, 594 bp, Bacillus subtilis
acgccatgattcttataaccgtgcttctttcatgtcaggcgttaaactgtcagtcgaacaagtcatgaagattgatcagcttgtgtatggtttagaaaatatcattgattagacggggggataaacaatgaaaattgctttgatcgcgcatgacaagaaaaaacaggatatggttcaatttacgactgcctatcgggatattttaaagaatcatgatctatacgcaaccggaaccacagggttgaaaattcatgaggcgacaggtcttcaaattgaacgttttcaatccggccctttagggggagaccagcaaatcggtgcactgatcgctgccaatgcactcgatcttgtcatttttttgcgcgacccgctgaccgcgcagccgcatgaaccggatgtctcggcattaatccgtttatgtgatgtgtattccattccgctcgccacaaatatgggtactgcggaaattcttgtgcgcacacttgatgaaggtgttttcgaattccgtgaccttcttcggggagaagagccgaatgtataatgctgacgttcttgcttttggcgcccacagtgatgatgtcgagatcggaatgg

SEQ ID NO: 7246 - DNA, 397 bp, Cricetus cricetus
gcccactgaagggcatcctgggctacaccgaggaccaggttgtctcctgcgacttcaacagtgactcccactcttccacctttgatgctggggctggcattgctctcaatgacaactttgtaaagctcatttcctggtatgacaatgaatttggctacagcaacagagtggtggacctcatggcctacatggcctccaaggagtaagaagcccaccctggaccatccaccccagcaaggactcgagcaagagggaggccctggctgctgagcagtccctgtccaataacccccacaccgatcatctccctcacagtttccatcccagacccccagaataaggaggggcttagggagccctactctcttgaataccatcaataaagttcactgcaccc

SEQ ID NO: 7247 - DNA, 350 bp, Mus musculus
aagggcatcttgggctacactgaggaccaggttgtctcctgcgacttcaacagcaactcccactcttccaccttcgatgccggggctggcattgctctcaatgacaactttgtcaagctcatttcctggtatgacaatgaatacggctacagcaacagggtggtggacctcatggcctacatggcctccaaggagtaagaaaccctggaccacccaccccagcaaggacactgagcaagagaggccctatcccaactcggcccccaacactgagcatctccctcacaatttccatcccagacccccataataacaggaggggcctagggagccctccctactctcttgaa

SEQ ID NO: 7248 - DNA, 401 bp, Rattus norvegicus
taaagggcatcctgggctacactgaggaccaggttgtctcctgtgacttcaacagcaactcccattcctccacctttgatgctggggctggcattgctctcaatgacaactttgtgaagctcatttcctggtatgacaatgaatatggctacagcaacagggtggtggacctcatggcctacatggcctccaaggagtaagaaacccctggaccacccagcccagcaaggatactgagagcaagagagaggccctcagttgcctgagagtccccatcccaactcagcccccaacactgagcactctccctcacaattccatcccagaccccataacaacaggaggggcctggggagccctcccttctctcgaataccatcaataaagttcgctgcaccctc

SEQ ID NO: 7249 - DNA, 398 bp, Cricetus cricetus
atggtgaaggtcggcgtgaacggatttggccgtattggacgcctggttaccagggctgccttcacttctggcaaagtggaagttgttgccatcaatgaccccttcattgacctcaactacatggtctacatgttccagtatgactctacccatggcaagttcaaaggcacagtcaaggctgagaatggaaagcttgtcatcaacgggaaggccatcaccatcttccaggagcgagatcccgccaacatcaaatggggtgatgctggcgccgagtatgttgtggaatctactggcgtcttcaccaccatggagaaggctggggcccacttgaagggcggggccaagagggtcatcatctccgccccttctgctgatgcccccatgtttgtgatgggtgt

SEQ ID NO: 7250 - DNA, 370 bp, Mus musculus
atggtgaaggtcggtgtgaacggatttggccgtattgggcgcctggtcaccagggctgccatttgcagtggcaaagtggagattgttgccatcaacgaccccttcattgacctcaactacatggtctacatgttccagtatgactccactcacggcaaattcaacggcacagtcaaggccgagaatgggaagcttgtcatcaacgggaagcccatcaccatcttccaggagcgagaccccactaacatcaaatggggtgaggccggtgctgagtatgtcgtggagtctactggtgtcttcaccaccatggagaaggccggggcccacttgaagggtggagccaaacgggtcatcatctccgccccttctg

SEQ ID NO: 7251 - DNA, 401 bp, Rattus norvegicus
atggtgaaggtcggtgtcaacggatttggccgtattggccgcctggtcaccagggctgccttctcttgtgacaaagtggacattgttgccatcaacgaccccttcattgacctcaactacatggtctacatgttccagtatgattctacccacggcaagttcaatggcacagtcaaggctgagaatgggaagctggtcatcaatgggaaacccatcaccatcttccaggagcgcgatcccgctaacatcaaatggggtgatgctggtgctgagtatgtcgtggagtctactggcgtcttcaccaccatggagaaggctggggctcacctgaagggtggtgccaaaagggtcatcatctccgccccttccgctgatgcccccatgtttgtgatgggtgtgaa

SEQ ID NO: 7252 - DNA, 398 bp, Cricetus cricetus
gaaccaagacaagtatgacaactccctcaagattgtcagcaatgcgtcctgcaccaccaactgcttagcccccctggccaaggtcatccatgacaactttggcattgtggaaggactcatgaccacggtccatgccatcactgccacccagaagactgtggatggcccctccggaaagctgtggcgtgatggccgtggggctgcccagaacatcatccctgcatccactggcgctgccaaggctgtgggcaaagtcatcccagagctgaacgggaagctgactggcatggccttccgtgttcctacccccaacgtgtccgttgtggatctgacatgtcgcctggagaaacctgccaagtatgaggacatcaagaaggtggtgaagcaggcatctgagg

SEQ ID NO: 7253 - DNA, 357 bp, Mus musculus
gaaatatgacaactcactcaagattgtcagcaatgcatcctgcaccaccaactgcttagcccccctggccaaggtcatccatgacaactttggcattgtggaagggctcatgaccacagtccatgccatcactgccacccagaagactgtggatggcccctctggaaagctgtggcgtgatggccgtggggctgcccagaacatcatccctgcatccactggtgctgccaaggctgtgggcaaggtcatcccagagctgaacgggaagctcactggcatggccttccgtgttcctacccccaatgtgtccgtcgtggatctgacgtgccgcctggagaaacctgccaagtatgatga

SEQ ID NO: 7254 - DNA, 401 bp, Rattus norvegicus
ccacgagaaatatgacaactccctcaagattgtcagcaatgcatcctgcaccaccaactgcttagcccccctggccaaggtcatccatgacaactttggcatcgtggaagggctcatgaccacagtccatgccatcactgccactcagaagactgtggatggcccctctggaaagctgtggcgtgatggccgtggggcagcccagaacatcatccctgcatccactggtgctgccaaggctgtgggcaaggtcatcccagagctgaacgggaagctcactggcatggccttccgtgttcctacccccaatgtatccgttgtggatctgacatgccgcctggagaaacctgccaagtatgatgacatcaagaaggtggtgaagcaggcggccgagggcccac

SEQ ID NO: 7255 - DNA, 328 bp, Bacillus subtilis
ttttgtgttagcagcggaaaaaatcttcaaaaaactagacgaatggagagattcatattcatttgtatccaaggtgctgaatcttggaggaggtttcggcattcgttatacggaagatgatgaaccgcttcatgccactgaatacgttgaaaaaattatcgaagctgtgaaagaaaatgcttcccgttacggttttgacattccggaaatttggatcgaaccgggccgttctctcgtgggagacgcaggcacaactctttatacggttggctctcaaaaagaagtggataagctgtacaatcgtttcatcattcggcgtgcgaattaa

SEQ ID NO: 7256 - DNA, 328 bp, Bacillus subtilis
atgacattgttcttacacggcacaagcagacaaaatcaacatggtcatttagaaatcggaggtgtggatgctctctatttagcggagaaatatggtacacctctttacgtatatgatgtggctttaatacgtgagcgtgctaaaagctttaagcaggcgtttatttctgcagggctgaaagcacaggtggcatatgcgagcaaagcattctcatcagtcgcaatgattcagctcgctgaggaagagggactttctttagatgtcgtatccggagagagctatatacggctgttgcagcaggctttccggcagaacgcatccactttca

SEQ ID NO: 7257 - DNA, 328 bp, Bacillus subtilis
tggaaacaataagagcagggaagaactgcggatggcgcttgagcaccgcatcggctgcattgtggtggataatttctatgaaatcgtcgcttcttgaagacctatgtaaagaaacgggtcactccatcgatgttcttcttcggatcacgcccggagtagaagcgcatacgcatgactacattacaacgggccaggaagattcaaagtttggtttcgatcttcataacggacaaactgaacgggccattgaacaagtattacaatcggaacacattcagctgctgggtgtccattgccatatcggctcgcaaatctttgatacggccgg

SEQ ID NO: 7258 - DNA, 449 bp, Bacillus subtilis
agtttgtcagtgaccatcccgagctgaatatcggggtcattgccaatgatatggcagcttctacatacgaattaaaaatcgtgaaacgggatatacaggattatagggacaatcatacaagatttgttatcctgtctcccgatgaaaacatatcttttgaagtgaattcaaaattgagctctaggcccaaaacgaccttaatggtcatgctgccgcaggatgatcagtccggggcgctgcatagagtgctgtctgcattttcttggagaaatttaaacctgtcaaaaattgagtcacgtccgactaaaaccggattaggccattatttctttattattgatattgagaaagcgtttgatgatgtattgattccaggggccatgcaggagcttgaagcactcggctgcaaagtgaggcttctgggtgcataccagtcttaccaattataa

SEQ ID NO: 7259 - DNA, 396 bp, Bacillus subtilis
atgaaagaggagacattttatcttgtccgtgaagatgtattgcccgatgcaatgagaaaaacattagaagtcaaaaagctgcttgatcgaaaaaaagcagattcagtagcagatgccgttcaaaaggtcgatttaagtagaagtgcgttttataaatacagggatgctgtttttccattctacaccatggtaaaagaacaaattatcacacttttctttcatttggaggataggtcaggtgcgttatctcagcttcttcaggcggtagctgattctggaagcaacgttctttccattcaccagaccattccgcttcaaggcagagcaaatgtgacactgtctatcagtacgtcggcaatggaagaagacattcatacattaatgaataagctcagg

SEQ ID NO: 7260 - DNA, 426 bp, Bacillus subtilis
ggttgaaatattaggttcaggtgcataagggagagaaaatcgtcatgaaagtcggttatttaggtccagcagctacatttacacatctagcagtcagttcttgttttcaaaacggcgccgaacatgttgcttaccgcaccattccggagtgtatagatgcagccgttgcaggcgaagttgattttgcttttgttcctttggaaaatgctttagaaggatctgttaatctaacaatagactatttaatacatgaacagcctttgccaatcgtgggtgaaatgacgttgccgattcaccagcacttgctcgtccatccctcaagagagaatgcatggaaagagctcgacaaaatttactcacattcacacgcgattgcgcaatgccataaatttcttcatcgacattttccttccgttccatatgaat

SEQ ID NO: 7261 - DNA, 670 bp, Mus musculus
ctttgaactcaatgggcagcttcgatccattctggttaaagacacccaggccatgaaggagatgcacttccatcccaaggctttgaaggatgtgaagggccaaattggggccccgatgcctgggaaggtcatagacatcaaggtggcagcaggggacaaggtggctaagggccagcccctctgtgtgctcagcgccatgaagatggagactgtggtgacttcgcccatggagggcactatccgaaaggttcatgttaccaaggacatgactctggaaggcgacgacctcatcctagagattgagtgatcttactccagcctggcagcctggccgaccctaccccaagcctctcaacagaagctgtgcagccagggcaggcccaggccagccagtacctgagagtaggaaggccaggcccttgaggtcctgtcccatgggacagcacacacactacctgcaatggcctgcccattcccttcagctatttgtccttttcttactggcaggtagttgctcacatattcatctcttgccaaataagggcctgctcctcgtgggagaccacaggtgtacagtcggtggccttgtacctgggggaggtggcttagggcttctacctctgggggtagagggaagacctaattcacaggtcctgggaaatttgctcaa

SEQ ID NO: 7262 - DNA, 986 bp, Rattus norvegicus
ggagggcctggagcctccctccctcccttgaacctgaaggagctggagaaggacctgattgataggcatggagaggaggtgaccccagaggacgttctctctgcagccatgtaccctgatgtctttgctcagttcaaagacttcacggctacctttggccccctggatagcctgaatactcgtctctttcttcaaggacccaaaattgcagaggagtttgaggttgagctggaacggggcaagaccttgcacatcaaagccctggctgtaagcgacctgaaccgtgctggccagaggcaggtgttctttgaactcaatgggcagcttcgatccattctggttaaagacacccaggccatgaaggagatgcacttccatcccaaggccttgaaggatgtgaagggccaaattggggcccctatgcctgggaaggtcatagacgtcaaggtggcagcaggagccaaggtggttaagggccagcccctctgtgtgctcagcgccatgaagatggagactgtggtgacttcgcccatggagggcactatccgaaaggttcacgtgaccaaggacatgactctggaaggcgatgacctcatcctagagattgagtgatcttactccagactggcagcctggccaaccctaccccaagcctctcaacagaagctgtgcagccagggcaggcccaggcagtacctgagggctaggccttgaggtcctgtcccatgggacagcacacacactacctgcaatggccctcccattcccttcagctatttgtccttgtcttgctggcaggcagttctcacatattcatctcttgccaaataagggtctgctcctcgtgggagaccacaggtgtacagtaggtggccttgtacctgggagaggggttctacctctgggggtagagggaagaagacctaattcataggtcctgggaaatttgctcaataaaagtggccttcccttgccctccacaaaaa

SEQ ID NO: 7263 - DNA, 670 bp, Mus musculus
aggtgcttggctggtacaagatgctgaagttccaaacagttcgagggggcctgaggctcctgggtgtccgccgatcctcctcggcccctgttgcctccccaaatgtccggcgtctggagtataagcctatcaagaaagtaatggtggccaacagaggtgagattgccatccgagtgtttcgtgcgtgcacagagctgggtatccgcacagtggctgtctactcggagcaggacacagggcagatgcacaggcagaaagctgatgaagcctaccttattggccgtggcctggcacctgtgcaggcctacctgcacattccagacatcatcaaggtggccaaggaaaatggtgtagatgcggtgcatcctggctatgggttcctctcagagcgagcagactttgcccaggcctgccaagatgctggagtccggttcattggtccaagcccagaggtggtccgcaagatgggagacaaggtggaagcccgggccattgccatcgctgcaggcgttccagtggtccccggcacggactcccccatcagctccctgcacgaggcgcatgagttctccaacaccttcggcttccctattatcttcaaggccgcctacggaggtgggggccgcggcatgcgggtcgtgcatagctatgaggagttggaagagaatta

SEQ ID NO: 7264 - DNA, 987 bp, Rattus norvegicus
cgcggcggccacggcttgaggcgacggggcgaagatgctgaagttccaaacagttcgagggggcctgaggctcctgggtgtccgccgatcctccacagcccccgttgcctccccaaatgtccggcgtctggagtacaagcccatcaagaaagtaatggtggccaacagaggtgagattgccatccgagtgtttcgtgcctgcacagagctgggtatccgcacagtggctgtctactcggagcaggacacaggccagatgcaccggcagaaagctgatgaagcctaccttattggccgtgggctggctcctgtgcaagcctacctgcacattccagacatcattaaggtggccaaggagaatggtgtagatgctgtgcaccctggctatgggttcctctcagagagagcagactttgcccaggcctgccaagatgctggagtccgattcattggtccaagcccagaggtggtccgcaagatgggagacaaggtggaagcccgggccattgccattgctgcaggcgttccagtggtccctggcactaattcccccatcaattccctgcatgaggcacacgagttctctaacacctatggtttccctattatcttcaaggctgcctatggaggtgggggccgtggcatgagggttgtgcatagctacgaggagctggaagagaattacacccgggcctaccctgaggccttggcagcctttgggaatggggcattgtttgtggagaaattcattgagaagccaagacacattgaggtgcagatcctaggggaccaatatgggaacatcttgcacttgtatgagcgggactgctccatccagcggcggcaccagaaggtggtagagattgcccctgctacccacctggacccccaacttcggtcacgcctcaccagtgactctgtcaaacttgccaagcaggttggctatgagaatgcaggcactgtggagttcctggtggacaagcatgg

SEQ ID NO: 7265 - DNA, 600 bp, Mus musculus
ccgcatcaatggctgtgccattcagtgtcgggtcaccaccgaggaccctgcacgcagcttccagccagacaccggccgcattgaggttttccggagtggtgagggcatgggcatccgcctggacaacgcctctgcattccagggcgctgtcatatcgccccactatgactctctgctcgtcaaggtcattgcacacggcaaagaccaccccacagctgccaccaagatgagcagagccctggccgagttccgtgtccgaggtgtaaagaccaacatccccttcctgcagaatgttctcaacaaccagcagttcctggcaggcacagtggacacccagttcatcgatgagaaccctgagctgttccagcttcggcctgcacagaaccgggcccagaagttgctacattacctcggacatgtcatggtgaatggccctaccactccaatccctgtcaatgtgagccccagtcctgtggatcctgctgttcctgtggtgcccataggcccacctccagctggtttcagggacatccttctgcgagaagggccagagggctttgcccgagctgtgcggaatcaccaggggctgctgttgatgga

SEQ ID NO: 7266 - DNA, 986 bp, Rattus norvegicus
caagcactacttcatcgaggtcaattcccgcctgcaggtggagcacacggtcactgaggagattacagatgtggacctggtccatgctcagatccatgtgtccgaaggccggagcctgcctgacctaggcctgcggcaggaaaacatccgaatcaatggttgtgccattcagtgtcgggtcaccactgaggaccctgcacgcagcttccagccagacactggccgcattgaggttttccggagtggtgagggcatgggcatccgcctggacaatgcctcagcattccagggagctgtcatatccccccactatgactccctgctcgtcaaagtcattgcccatggcaaagaccaccctacagctgccaccaagatgagcagagccctggcggagttccgtgtccgaggtgtaaagaccaacatccccttcctgcagaatgtgctcaacaaccagcagttcctagcgggcattgtggacacccagttcatcgatgagaaccccgagctgttccagctgcggcctgcacagaaccgggcccagaagttgctacattaccttggacacgtcatggtcaatggccctaccactccaatccccgtcaaggtcagtcccagccctgtggaccccattgttcctgtggtgcccataggcccacccccagctggtttcagagacatccttctgcgagaggggccagagggctttgccagagctgtgcggaatcaccaggggctgctgctaatggacacaaccttccgggatgcccaccagtcactacttgccactagagtgcgcacacacgatctcaaaaagattgcaccctacgttgcccacaacttcaacaacctcttcagcatagagaactggggaggagccacatttgacgtggccatgcgcttcttgtatgagtgcccctggcggcggctccaggagctccgggagctcatccccaacatcccattccagatgctactgaggggggcca

SEQ ID NO: 7267 - DNA, 579 bp, Cricetulus griseus
gctgatgttgtggatgtggcagtaaactccatgtctgggatgacttcacagcccacatgggtgccctggtggcttgtaccaaagggactcctctgaacacagaggtgcccctggagcgtgtgtttgactacagtgaatactgggaaggggctcggggcctgtatgcggcctttgactgcacggctaccatgaagtctggcaactcaaatgtgtatgaaaatgaaatcccagggggccagtacaccaacctacacttccaggcccacagcatggggcttggctccaagttcaaggaggtcaaaaaggcctatgtggaggctaaccaaatgctgggggacctcatcaaggtgacaccatcctccaagattgtgggggacctggcccagttcatggtgcaaaatgggttaagccgagcagaggctgaagctcaggcaaaagagctgtccttccctcgctctgtggtggaattcctgcagggctacattggaattccccatggaggcttccctgagcccttccgctctaaggtgctaaaggacctgccaagattagaggggaggcctggagcctcccttcctc

SEQ ID NO: 7268 - DNA, 630 bp, Mus musculus
atactcactggagtactacatgggcttagctgaagaactggtgcgagctggcactcacatcctgtgcattaaggacatggcgggcctgctgaagcctgccgcctgcaccatgctggtcagctccctccgggaccgattccccgacctcccactgcacatccatacccatgatacatcaggggcaggtgtggcagccatgctggcctgtgcacaagcaggggctgatgttgtggacgtggcagtagactccatgtctgggatgacctcacagccaagcatgggggccctggtggcctgtaccaaagggactcctttggacacagaggtacccctggagcgtgtgtttgactacagtgagtactgggaaggggctcggggactgtacgcagccttcgattgcacggctaccatgaagtctggcaactccgacgtgtatgagaatgagattccagggggccagtacaccaacctgcacttccaggcccatagcatggggcttggctccaagttcaaggaggtcaagaaggcctatgtggaggctaaccagatgctgggggacctcatcaaggtgacaccatcctccaagattgtgggggacctggcccagttcatggtgcagaatgggttgag

SEQ ID NO: 7269 - DNA, 986 bp, Rattus norvegicus
atgctgtgggctacaccaactaccctgacaacgtggtcttcaagttctgtgaggtggccaaagagaatggcatggacgtcttccggatctttgactcccttaactacctgccaaacatgctgctgggcatggaagcagctggcagtgctgggggtgtggtggaagctgccatctcctacacgggtgacgtggctgaccccagtcgcactaaatactcactggagtactacatgggcttagctgaagaactggtgcgagccggcactcacatcctctgcattaaggacatggcaggcctgctgaagcctgcagcatgcaccatgctggtcagctccctccgggaccggttccccgacctcccactgcacatccatacccatgacacatcagggtcaggtgtggcagccatgttggcctgtgcacaagctggggctgatgttgtggatgtggcagtcgactctatgtctgggatgacctcacagcccagcatgggggccctggtggcctgtaccaaagggactcctctggacacagaggtacccctggagcgtgtgtttgactacagtgagtattgggaaggggctcgggggctgtatgcagcctttgattgcacggctaccatgaagtctggcaactcagacgtgtatgagaatgaggatccagggggccagtacaccaacctacacttccaggcccacagcatgggacttggctccaagttcaaggaggtcaagaaggcctatgtggaggctaaccagatgctgggggacctcatcaaggtgacaccatcctccaagattgtgggggatctggcccagttcatggtgcagaacgggttgagccgggcagaggcagaagctcaggcagaagagctgtccttcccccgctctgtggtggagttcctgcagggctacattggcattccccatgggggtttccctgaacccttccgttctaaggtgctaaaggacctgccaaggatagaa

SEQ ID NO: 7270 - DNA, 604 bp, Bacillus subtilis
ggctgatgaattatgcggcttaaagctgtctgaagcggacaagctgcatttagcgagtctagaagaaggacacccggacaatgctggcgcttctctcgtcggcggacttgtgatcggcctgcatgaggatgacgagacccaaatgatccgcgtcccgaatgctgacattgacgtagtcgttgtcattcctttttatgaagtgctgacaagagacgcgagagacgtgcttccgaaggagtttccatatgccgatgccgtaaaagcaagtgctgtcagcaatatcctcattgctgcgatcatgtccaaggattggccgcttgtcgggaaaatcatgaagaaggatatgttccatcagccgtaccgggcgatgcttgtgcctgagctgtcaaaagtagagcacgtcgccgagatgaagggcgcatatggaacggctctcagcggagcaggcccaacgattctcgtcatgaccgaaaaaggaaagggagaagagctaaaagaacagctcgcgcttcatttccctcattgtgaagtagacgctttgaccgttccgaaagagggaagtataatagagcgaaatcctttatatcaagtaaaaagtgtatag

SEQ ID NO: 7271 - DNA, 718 bp, Bacillus subtilis
atgtggaaaggacttatccatcaatataaagaatttttacctgtaacagatcaaacaccggcgctaactttacatgaaggaaacacacctcttattcacctgccgaagctgtctgagcagctcggaattgagcttcatgtcaaaacggaaggcgtcaatcctacgggatcatttaaagatcgcggaatggttatggctgtggcaaaggcaaaagaagaaggcaatgacacgattatgtgcgcgtcaacaggtaacacttccgctgctgcggcagcatatgcagcccgtgctaacatgaaatgcattgtcatcatcccgaacggaaaaattgcatttggaaaactcgctcaagctgtcatgtacggagccgagattatcgcaattgacggaaactttgacgatgcgcttaaaattgtccgttccatctgtgagaaatcaccgattgcccttgtcaactcagtcaacccttaccgcattgaaggccaaaaaactgctgccttcgaagtgtgcgaacagctgggggaagcgcctgatgttttagcgatcccggtcggaaatgctggaaacatcactgcgtactggaagggcttcaaggaatatcatgagaaaaacggcacaggccttccgaaaatgcgcggctttgaagctgagggtgcggcggcaatcgtgcgcaatgaagtgattgaaaatccggaaacaatagcgacagccattcgta

SEQ ID NO: 7272 - DNA, 604 bp, Bacillus subtilis
ctgtaaaggcagccgaggaatccaatgggaaaattgacgaagtcactgatgatgaaatccttcacgcatatcagctgatcgcccgtgtagaaggcgtgtttgcagaaccaggttcttgcgcgtctatcgcaggagtgctgaaacaggtgaaatccggagaaattccgaaaggcagcaaggtcgtagctgtgttaacaggaaacggactgaaagatccgaacacagcggtcgacatttcagaaatcaagcctgtcacattgccgactgatgaagacagcatccttgaatatgtaaaaggagcggcccgtgtatgaacgaagccgacatgctgttctctgtcactgttcccggaagcacagctaacctaggccccggctttgattcagtcggaatggcgctcagcagatatttgaagctgaccgtctttgaaagcgacaaatggtcttttgaggctgaaacagaaacagtcgccggaattcgcggtacagataacctgatctaccaagtggctaaacggaccgcagatttgtacggaaaagaaatgcctcctgtccatgtgaaggtgtggagcgacatcccgcttgcacgcggccttggcagcagc

SEQ ID NO: 7273 - DNA, 820 bp, Cricetulus griseus
cccagcagtttctttctggttttgtgagaatgaggactatccttatttggacactaatttggatacctatgagaaactaattcagaaagttcctcagctgaacaaaatggttcgtgcagcagcagaagtagctggtcagttcataattaaacttacccatgacattgaactgaacctggactatgatatgtataacaacaagatactgtcatttgtgaaggagctgaaccaattcagagcagatatcaaggcaatgggtctgagtctacagtggctgtattctgctcgtggagactttttccgtgctacatctagactgacgactgatttccataatgctgagaaaacaaacagatttgtcgtgagggaaatcaataaccgtattatgaaagtggaatatcacttcctgtcaccctacgtatctccaagagagtctcctttccgacacatcttctggggttccggctctcacactctcacggctttagtggagaacttgaagcttcgtcagaaaaacagtagtgcttttaacgaaacactcttcagaaaccagttggccctagctacttggactattcagggagttgcaaatgccctctctggtgacatttgggatattgacaatgagttttaaatgtaacataattaaataagagcagggcagtctgtttctagacttgtactggttgtgctaaattttcattagagctcaaatctaatgttataattctacccgatcatcctgatactaaatgtctttaggcagcagcttttagtgcagggttggacctacacttgaagttacagtggataacacttt

SEQ ID NO: 7274 - DNA, 600 bp, Mus musculus
tgtgaggatgcagactatccttatttgggcactagattggatacctatgaggcattgactcagaaagttcctcagctcaaccaaatggttcgtacagcagcggaagtggctggtcagctcattattaaacttacccatgacgttgaattgaacctggactatgagatgtataacagcaaactactgtcatttatgaaggatctgaaccagttcaaaacagatatcagggatatgggtctaagtctacagtggctgtattccgctcgtggagactacttccgtgctacttctagactaacaactgattttcataatgctgagaaaacaaacagatttgtcatgagggaaatcaatgatcgtattatgaaagtggagtatcacttcctgtcgccctatgtatctccaagagagtctcctttccgacatatcttctggggctctggctctcacactctctcagctttagtggagaacttgaagcttcgtcaaaaaaatattactgcttttaatgaaaccctcttcagaaaccagttggccctggctacttggactattcagggagtcgcaaatgccctctctggtgacatttggaatattgac

SEQ ID NO: 7275 - DNA, 1137 bp, Rattus norvegicus
ctccaattgagctgtatgcctgaaggatttagctggcttccattcccctaaagtagacagttacttttcagaagaggtgcaacttgttttcttgccagcaaggttgaactaggtccttctgctggataaaagaaaggaagtttgtctgtttacaggaataaggccttattggtttaacctttgtgttatttaggatgagaccagaagccaaagacttcaagttttctctccactgtcatctacccagtagtctttagttctttgggttgttttgtttttgttttgtttttcttttccaacactttctgaaaaagaacaggtttagactcagtctgtcagcagaacacactgccgagctcggtacccggggatcctctagagtcgacctgcaggcatgcaagctttccctatagtgagtcgtattagagcttggtgcatgcctgcaggtcgactctagaggatccccgggtaccgagctctggccaaagtgctggtcttcagggaagctctgtcgtttttggcactgagatatttattgtttatttatcagtgacagagttcactataaatagtgtttttttaatagaagataattatcggaagcagtgccttccataattatgacagttatactgtcgttttcttttaataaaagcagcatctgctaatgagacccacagatactggaagttttgcacttacggtcagcacttgcgggctttagaaaggagaaagccacaagccaaacaatatccgatgagctagaagaggattgggttaaataagagattcctagttgagttggaaaaaaatgataattctaagtccagtgagttgtggccaagttaaatgtcatttaaaggctatgatagtacatcaacaaaattctatagctcagtttattcaagatgtaactcaaatccaattttgcaaaatttccagtacctttgtcacaaacttaactcacattatcgggagcagtgtcttccataatgtataaagaacaaggtagtttttgcctaccacagtgtctatatcggagacagtgacctccatatgttacactaagggtgtacgtaattatcgggaacagtgtttcccataattttcttcatgcgatgacatcttcaaagcttg

SEQ ID NO: 7276 - DNA, 820 bp, Cricetulus griseus
atgatggatcaagccagatcagcaatctctaacttgtttggtggagaaccattgtcatacacccggtttagcctggctcggcaagtagatggagataacagtcacgtggagatgaaattggctgtagatgaagaagaaaacactgacaataacatgaaggccagtgtccgaaaacatagaaggcttaatggaagactctgctttgggacaattgcagtagtcatctttttcttgattggatttatgattggctacctaggctattgtaaacgcacagaacaaaaagactgtgtaagactggcagaaacggagacaggcaattcagaaatcatccaagaagaaaacattcctcaatcttctcgcttatattgggcagacctcaaaaaactgttgtcagagaagctggatgccatagagttcactgacaccatcaagcagctgagccagacctctcgggaggcaggatctcaaaaagatgaaaatcttgcctattatattgaaaatcagttccgtgactttaaactcagcaaagtctggcgagatgaacattatgtgaagattcaggtgaaaggcagtgctgctcaaaacgcggtgaccataataaatgtaaatggtgactcagacctagtggagaatcctgggggctatgtggcatatagtaaagctacaacagtttctggtaaactgatccatgctaattttggcactaaaaaagactttgaagatttaaagtatcctgtgaatggatctttagtgattgttagagcagggaaaatcacttttgcagaaaaggttgcaaatgcccaaagctttaatgcaa

SEQ ID NO: 7277 - DNA, 600 bp, Mus musculus
aagccagatcagcattctctaacttgtttggtggggaaccattgtcatacacccggtttagccttgctcggcaagtagatggagataacagtcatgtggagatgaaactggctgcagatgaagaagaaaatgccgacaataacatgaaggctagtgtcagaaaacccaagaggtttaatggaagactctgctttgcagctattgcactagtcattttcttcttgattggattcatgagtggctacctgggctattgtaagcgtgtagaacaaaaagaggagtgtgtgaaactggctgaaacggaggagacagacaagtcagaaaccatggaaacagaggatgttcctacatcatctcgcttatattgggcagacctcaaaacactgttgtcagagaagttgaactccatagagtttgctgacaccatcaagcagctgagccagaatacatacactcctcgtgaggctggatctcaaaaagatgaaagtcttgcctattatattgaaaatcagttccatgaatttaaattcagcaaagtctggcgagatgaacactatgtgaagattcaagtgaaaagcagcattggtcaaaacatggtga

SEQ ID NO: 7278 - DNA, 1137 bp, Rattus norvegicus
catagagttcactgacatcatcaagcagctgagccagaatacatatactcctcgtgaggctggatctcagaaagacgagaatcttgcctattatattgaaaatctgttccatgactttaaattcagcaaagtctggcgagatgaacattatgtgaagattcaagtgaaaaacagtgtttctcaaaacttggtgaccataaattcaggtagtaacattgacccagtggaggctcctgagggttatgtggcatttagtaaagctggagaagttactggtaaactggtccatgctaattttggcactaaaaaggactttgaagaattaaattattctgtgaatggatctttagtgattgttagagcagggaaaattacttttgcagaaaaggttgcaaatgcccaaagctttaatgcaattggtgtcctcatctacatggacaggaatacgttccccgttgttgaggcagaccttcaattctttggacatgctcatctaggaactggggatccatatacacctggctttccttctttcaaccatactcagtttccgccatctcagtcatctggattgccttctatacctgtgcagacgatctcaagagctcctgcagaaaagctattcaaaaacatggaaggaaactgtcctcctagttggaatatagattcctcatgtaagctggaactttcacagaatcaaaatgtgaagctcactgtgaacaatgtactgaaagaaacaagaatacttaacatctttggcgttattaaaggctatgaggaaccagaccgctacattgtagtaggagcccagagagacgcttggggccctggtgttgcgaagtccagtgtgggaacaggtcttctgttgaaacttgcccaagtattctcagatatgatttcaaaagatggatttagacccagcaggagtattatctttgccagctggactgcaggagactatggagctgttggtccgactgagtggctggaggggtacctttcatctttgcatctaaaggctttcacttacattaatctggataaagtcgtcctgggtactagcaacttcaaggtttctgccagccccctattatatacacttatggggaagataatgcaggacgtaaagcatccgat

SEQ ID NO: 7279 - DNA, 820 bp, Cricetulus griseus
ttggtgtcctgatatacatggaccagactaaattccctgttgttgaagcagaactttcactctttggacatgctcatctaggaactggtgatccatacacacctgggtttccatctttcaatcatactcagtttcctccatctcagtcatcaggattacctagtatacctgttcagacgatctcaagaaaggctgcagaaaagctatttcaaaacatggaaacaaactgtcctcctagttggaacacagattctttgtgtaagctagaatcttcacagggtataaatgtgaacctctctgtgaacaacgtgctgaaagaaacaagaatacttaacatctttggagttattaaaggatttgaggaaccagaccggtacattgtagtaggtgcccagagagatgcctggggtcctggtgctgcaaaatccagtgtgggaacaggtcttctgttgaaacttgcccaagcattctcagatatggtttcaagaggtgggtttaaacccagcagaagcattatctttgccagctggagtgcaggagacttcggagctgttggtgccaccgagtggctagagggatacctttcatctctgcatttgaaagctttcacttatattaatctggataaagttgtccttggtactagaaacttcaaggtttctgccagccctctattatatacacttattgagaagacaatgcaggacgtaagacatccaattgatgggaaacctctctatcgagacagcaattggatcagcaaagttgaggatctttcccttgacaatgctgctttcccctttcttgcatattctggaat

SEQ ID NO: 7280 - DNA, 600 bp, Mus musculus
gacaagaataaattccccgttgttgaggcagaccttgcactctttggacatgctcatctaggaactggtgatccatacacacctggctttccttctttcaatcatactcagtttccgccatctcagtcatcagggttgcctaatatacctgtgcaaacaatctcaagagctgctgcagaaaagctatttggaaaaatggaaggaagctgtcctgctagatggaacatagattcttcatgtaagctggaactttcacagaatcaaaatgtgaagctcattgtgaaaaacgtactgaaagaaagaagaatacttaacatctttggagttattaaaggttatgaggaaccagaccgttatgttgtagtaggagcccagagagacgctttgggtgctggtgttgcggcgaagtccagtgtgggaacaggtcttctgttgaaacttgcccaagtattctcagatatgatttcaaaagatggatttagacccagcagaagtataatctttgccagctggactgcaggcgactttggagctgttggtgccactgagtggttggagggatacctttcatctttgcatttaaaagctttcacttatatt

SEQ ID NO: 7281 - DNA, 1137 bp, Rattus norvegicus
gatggaaaatatctatatcgaaacagtaattggattagcaaaattgaggaactttccttggacaatgctgcattcccttttcttgcatattcaggaatcccagcagtttctttctgtttttgtgaggatgaggactatccttatttgggcactaaactagatacctatgagatattaattcagaaagttcctcagctcaaccaaatggttcgtacagcagcagaggtggccggtcagttcattattaaacttacccatgacattgagttgaccctggactatgagatgtacaacagcaaactactgtcatttatgaaggatctgaaccagttcaaagcagatataaaagatatgggtctaagtctacaatggctgtattctgctcgtggagactacttccgtgctacttctagactaacaactgattttcataatgctgagaaaacaaacagattcgtcatgagggaaatcaatgatcgtattatgaaagtggagtatcacttcctgtcaccctatgtatctccaagagagtctcctttccgacacatcttctggggctctggctctcacaccctctcagctttagtggagaacctgagacttcgtcagaaaaatatcactgctttcaatgaaacgctcttcagaaaccagttggccctggctacgtggactattcagggagttgcaaatgccctctctggtgacatttggaatattgacaatgagttttaaatgtaatgtgcataattaagtgagagagggtagtctgtttctagacttgagctggttgtgctaaattttcattagagctcgaattaatgttaaaaattctacccaatcatctaatgtgtttaggcagcagcttttagtgcagggttggacccacacttcaagttacagtggacaacactttccatgttcatgataccttcttagattatctttagaattttgagtcttttgtaataccttgctctttgcttcatggtcatgaaaatgtcagaaccagttgtaagaacattgctataagtcctgagggcactactagtatcttgaggtgggaggaagagggtgtatgtgaggggcagagtggtcgctgggtgtgattccccatctccatctgaccctcactgggat

SEQ ID NO: 7282 - DNA, 600 bp, Bacillus subtilis
ttaacatttgtcaatgaacatggggcgcgagctgtacttatcggtgaatcattgatgagacaaacttctcagcgtaaagcaatccatgctttgtttagggagtgaggttgtgaagaaaccggcattaaaatattgcggtattcggtcactaaaggatttgcagcttgcggcggaatcacaggctgattacctaggatttatttttgctaaaagcaaacgaaaagtatctccggaagatgtgaaaaaatggctgaaccaagttcgtgtcgaaaaacaggttgcaggtgtttttgttaatgaatcaatagagacgatgtcacgtattgccaagagcttgaagctcgacgtcattcagcttcacggtgatgaaaaaccggcggatgctgctgctcttcgcaagctgacaggctgtgaaatatggaaggcgcttcaccatcaagataacacaactcaagaaatagcccgctttaaagataatgttgacggctttgtgattgattcatctgtaaaagggtctagaggcggaactggtgttgcattttcttgggaatgtgtgccggaatatcagcaggcggctattggtaaacgctgttttatcgc

SEQ ID NO: 7283 - DNA, 600 bp, Bacillus subtilis
caccgagagagacatacggcgggtgtattgcctacattgggtttgacgggaatatcgactcttgtattacgattcgcacgatgagtgtaaagaacggtgttgcatcgatacaggcaggtgctggcattgttgctgattctgttccggaagccgaatacgaagaaagctgtaataaagccggtgcgctgctgaaaacgattcatattgcagaagacatgtttcatagcaaggaggataaagctgatgaacagatttctacaattgtgcgttgacggaaaaacccttactgccggtgaggctgaaacgctgatgaatatgatgatggcagcggaaatgactccttctgaaatgggggggatattgtcaattcttgctcatcggggggagacgccagaagagcttgcgggttttgtgaaggcaatgcgggcacacgctcttacagtcgatggacttcctgatattgttgatacatgcggaacagggggagacggtatttccacttttaatatctcaacggcctcggcaattgttgcctcggcagctggtgcgaaaatcgctaagcatggcaatcgctctgtctcttctaaaagcggaagcgct

SEQ ID NO: 7284 - DNA, 593 bp, Bacillus subtilis
aaaggacggagagcgccgggaatataccgtttcacccgaagatttcggtttcacaaatggcagacttgaagatttacaggtgcagtcaccgaaagagagcgcctatctcattcagaatatttttgaaaataaaagcagcagttccgctttatctattacggcttttaatgcgggagctgcgatttacacggcgggaattaccgcctcactgaaggaaggaacggagctggcgttagagacgattacaagcggaggcgctgccgcgcagcttgaacgactaaagcagaaagaggaagagatctatgcttgaaaaaatcatcaaacaaaagaaagaagaagtgaaaacactggttttgccggtagagcagcctttcgagaaacgttcatttaaggaggcgctggcaagcccgaatcggtttatcgggttgattgccgaagtgaagaaagcatcgccgtcaaaagggcttattaaagaggattttgtgcctgtgcagattgcaatagactatgaggctgcgaaggcagatgcgatttccgttttaacagacaccccgttttttcaaggggaaaacagttatttatcagacgtaaag

SEQ ID NO: 7285 - DNA, 12 bp, artificial
  six-frame stop sequence
ctaactaattag

SEQ ID NO: 7286 - DNA, 300 bp, Cricetulus griseus
  misc_feature (178)..(195): n is x, which marks a region of a low complexity sequence or a vector sequence
  misc_feature (263)..(284): n is x, which marks a region of a low complexity sequence or a vector sequence
tagaattcagcggccgctgaattctaggcagccatggcgcccagccggaatggcatgatcctgaagccccacttccacaaggattggcagcggcgagtggacacttggttcaaccagccggcacgcaagatccgcagacgcaaggcccggcaggcgaaagcgcgccgcatcgcccctnnnnnnnnnnnnnnnnnnatcaggccgatagtgaggtgccctacagtgagataccacaccaaggtccgagctggcaggggcttcannnnnnnnnnnnnnnnnnnnnntggtatccataagaaa

SEQ ID NO: 7287 - DNA, 295 bp, Cricetulus griseus
  misc_feature (1)..(21): n is x, which marks a region of a low complexity sequence or a vector sequence
  misc_feature (173)..(190): n is x, which marks a region of a low complexity sequence or a vector sequence
  misc_feature (258)..(279): n is x, which marks a region of a low complexity sequence or a vector sequence
nnnnnnnnnnnnnnnnnnnnnggcagccatggcgcccagccggaatggcatgatcctgaagccccacttccacaaggattggcagcggcgagtggacacttggttcaaccagccggcacgcaagatccgcagacgcaaggcccggcaggcgaaagcgcgccgcatcgcccctnnnnnnnnnnnnnnnnnnatcaggccgatagtgaggtgccctacagtgagataccacaccaaggtccgagctggcaggggcttcannnnnnnnnnnnnnnnnnnnnntggtatccataagaaa

SEQ ID NO: 7288 - DNA, 292 bp, Cricetulus griseus
  misc_feature (170)..(187): n is x, which marks a region of a low complexity sequence or a vector sequence
  misc_feature (255)..(276): n is x, which marks a region of a low complexity sequence or a vector sequence
cgcgtccgctgtaccggaggcagccatggcgcccagccggaatggcatgatcctgaagccccacttccacaaggattggcagcggcgagtggacacttggttcaaccagccggcacgcaagatccgcatacgcaaggcccggcaggggagagcgcgccgcatcgcccctnnnnnnnnnnnnnnnnnnatcaggccgatagtgaggtgccctacagtgagataccacaccaaggtccgagctggcaggggcttcannnnnnnnnnnnnnnnnnnnnntggtatccataagaaa

SEQ ID NO: 7289 - DNA, 25 bp, Cricetulus griseus
gcccagccggaatggcatgatcctg

SEQ ID NO: 7290 - DNA, 25 bp, Cricetulus griseus
agccggaatggcatgatcctgaagc

SEQ ID NO: 7291 - DNA, 25 bp, Cricetulus griseus
tggcatgatcctgaagccccacttc

SEQ ID NO: 7292 - DNA, 25 bp, Cricetulus griseus
agccccacttccacaaggattggca

SEQ ID NO: 7293 - DNA, 25 bp, Cricetulus griseus
cagcggcgagtggacacttggttca

SEQ ID NO: 7294 - DNA, 25 bp, Cricetulus griseus
cggcgagtggacacttggttcaacc

SEQ ID NO: 7295 - DNA, 25 bp, Cricetulus griseus
cttggttcaaccagccggcacgcaa

SEQ ID NO: 7296 - DNA, 25 bp, Cricetulus griseus
atcaggccgatagtgaggtgcccta

SEQ ID NO: 7297 - DNA, 25 bp, Cricetulus griseus
ccgatagtgaggtgccctacagtga

SEQ ID NO: 7298 - DNA, 25 bp, Cricetulus griseus
agtgaggtgccctacagtgagatac

SEQ ID NO: 7299 - DNA, 25 bp, Cricetulus griseus
gataccacaccaaggtccgagctgg

SEQ ID NO: 7300 - DNA, 25 bp, Cricetulus griseus
accacaccaaggtccgagctggcag
